(19) United States
(12) Patent Application Publication
(10) Pub. No.: US 2017/0349638 A1
(43) Pub. Date: Dec. 7, 2017

(54) COMPANION DIAGNOSTIC TOOL FOR PEPTIDOMIMETIC MACROCYCLES

(71) Applicant: AILERON Therapeutics, Inc., Cambridge, MA (US)

(72) Inventor: Manuel Aivado, Chester Springs, PA (US)

(21) Appl. No.: 15/463,826

(22) Filed: Mar. 20, 2017

Related U.S. Application Data
(60) Provisional application No. 62/311,071, filed on Mar. 21, 2016.

(51) Int. Cl. C07K 14/47; A61K 38/17; A61K 9/00; C12Q 1/68; A61K 38/12

(52) U.S. Cl. CPC C07K 14/47; C12Q 1/6886; A61K 38/12; A61K 9/0019; A61K 38/17; C12Q 2600/156; C12Q 2600/158

(57) ABSTRACT

The present invention provides diagnostic tools, systems, and methods for detecting wild type p53 and p53-associated mutations for the treatment of disease with peptidomimetic macrocycles.

### CROSS REFERENCE

[0001] This application claims the benefit of U.S. Provisional Application No. 62/222,481 filed Sep. 23, 2015, which is incorporated herein by reference in its entirety.

### SEQUENCE LISTING

[0002] The instant application contains a Sequence Listing which has been submitted electronically in ASCII format and is hereby incorporated by reference in its entirety. Said ASCII copy, created on Apr. 27, 2017, is named 35224_812_201_SL.TXT and is 2,106,303 bytes in size.

### BACKGROUND OF THE INVENTION

[0003] Tumor suppressor p53 mediates cell cycle arrest, senescence, and apoptosis in response to DNA damage and cellular stress to prevent the development of cancer. The E3 ubiquitin ligase MDM2 (HDM2) negatively regulates p53 function via the ubiquitylation-proteasomal pathway. The loss of p53 activity, either by deletion, mutation, or MDM2 overexpression, is the most common defect in human cancers.

### SUMMARY OF THE INVENTION

[0004] In some embodiments, the invention provides a method for treating a condition in a subject in need thereof, the method comprising: a) performing an assay to determine a mutational status of a gene in the subject that modulates the p53 pathway and b) administering to the subject a therapeutically-effective amount of a peptidomimetic macrocycle or a pharmaceutically-acceptable salt thereof.

### INCORPORATION BY REFERENCE

[0005] All publications, patents, and patent applications mentioned in this specification are herein incorporated by reference to the same extent as if each individual publication, patent, or patent application was specifically and individually indicated to be incorporated by reference.

### BRIEF DESCRIPTION OF THE DRAWINGS

[0006] The novel features of the invention are set forth with particularity in the appended claims. A better understanding of the features and advantages of the present invention will be obtained by reference to the following detailed description that sets forth illustrative embodiments, in which the principles of the invention are utilized, and the accompanying drawings of which:

[0007] FIG. 1 describes the synthesis of Fmoc-Me-6-Chloro-Tryptophan & Fmoc-6-Chloro-Tryptophan.

[0008] FIG. 2 shows human wild type P53 coding and protein sequence (SEQ ID NO: 2582).

[0009] FIG. 3 shows a structure of peptidomimetic macrocycle 46 (Table 14), a p53 peptidomimetic macrocycle, complexed with MDMX (Primary SwissProt accession number Q7ZUW7; Entry MDM4_DANRE).

[0010] FIG. 4 shows overlaid structures of p53 peptidomimetic macrocycles 142 (Table 14) and SP43 bound to MDMX (Primary SwissProt accession number Q7ZUW7; Entry MDM4_DANRE).

[0011] FIGS. 5A-F describe the results of a cell viability assay, a competition ELISA assay, GRIP assay, Kd data, p21 activation assay, fluorescence polarization competition binding and circular helicity data for exemplary peptidomimetic macrocycles of the invention. FIG. 5A-F discloses SEQ ID NOS 42-182, respectively, in order of appearance.

[0012] FIGS. 6A-D provide data from a variety of peptidomimetic macrocycles. FIG. 6A-D discloses SEQ ID NOS 46, 167, 181, 218, 221, 348, 293, 294, 387, 537, 533, 547, 605, 548, 598, 283, 378, 664, 46, 167, 181, 218, 221, 348, 293, 294, 387, 537, 533, 547, 605, 548, 598, 283, 378, 664, 706, 703, 708, 710, 693, 511, 628, 707, 720, 610, 609, 646, 695, 735, 379, 731, 666, 591, 718, 706, 703, 708, 710, 693, 511, 628, 707, 720, 610, 609, 646, 695, 735, 379, 731, 666, 591 and 718, respectively, in order of appearance.

[0013] FIGS. 7A-B provide data from a variety of peptidomimetic macrocycles.

[0014] FIG. 8 shows the effect of SP154, a peptidomimetic macrocycle, on tumor growth in a mouse MCF-7 xenograft model.

[0015] FIG. 9 shows the effect of SP249, a peptidomimetic macrocycle, on tumor growth in a mouse MCF-7 xenograft model.

[0016] FIG. 10 shows the effect of SP315, a peptidomimetic macrocycle, on tumor growth in a mouse MCF-7 xenograft model.

[0017] FIG. 11 shows the effect of SP252, a point mutation of SP154, on tumor growth in a mouse MCF-7 xenograft model.

[0018] FIG. 12 shows a plot of solubility for peptidomimetic macrocycles with varying C-terminal extensions.

[0019] FIG. 13 shows the binding affinity of compound 1 to human mutant and wild type p53.

### DETAILED DESCRIPTION OF THE INVENTION

[0020] The human transcription factor protein p53 induces cell cycle arrest and apoptosis in response to DNA damage and cellular stress, and thereby plays a critical role in protecting cells from malignant transformation. The E3 ubiquitin ligase MDM2 (also known as HDM2) negatively regulates p53 function through a direct binding interaction that neutralizes the p53 transactivation activity, leads to export from the nucleus of p53 protein, and targets p53 for degradation via the ubiquitylation-proteasomal pathway. Loss of p53 activity, either by deletion, mutation, or MDM2 overexpression, is the most common defect in human cancers. Tumors that express wild type p53 are vulnerable to pharmacologic agents that stabilize or increase the concentration of active p53. In this context, inhibition of the activities of MDM2 can restore p53 activity and resensitize cancer cells to apoptosis in vitro and in vivo.

[0021] MDMX (MDM4) has more recently been identified as a similar negative regulator of p53, and studies have revealed significant structural homology between the p53 binding interfaces of MDM2 and MDMX. The p53-MDM2 and p53-MDMX protein-protein interactions are mediated by the same 15-residue alpha-helical transactivation domain of p53, which inserts into hydrophobic clefts on the surface of MDM2 and MDMX. Three residues within this domain of p53 (F19, W23, and L26) are essential for binding to MDM2 and MDMX.

[0022] Provided herein are p53-based peptidomimetic macrocycles that modulate an activity of p53. Also provided herein are p53-based peptidomimetic macrocycles that inhibit the interactions between p53, MDM2 and/or MDMX proteins. Further, provided herein are p53-based peptidomimetic macrocycles that can be used for treating diseases including, but not limited to, cancer and other hyperproliferative diseases.

[0023] As used herein, the term “macrocycle” refers to a molecule having a chemical structure including a ring or cycle formed by at least 9 covalently bonded atoms.

[0024] As used herein, the term “peptidomimetic macrocycle” or “crosslinked polypeptide” refers to a compound comprising a plurality of amino acid residues joined by a plurality of peptide bonds and at least one macrocycle-forming linker which forms a macrocycle between a first naturally-occurring or non-naturally-occurring amino acid residue (or analog) and a second naturally-occurring or non-naturally-occurring amino acid residue (or analog) within the same molecule. Peptidomimetic macrocycle include embodiments where the macrocycle-forming linker connects the α carbon of the first amino acid residue (or analog) to the α carbon of the second amino acid residue (or analog). The peptidomimetic macrocycles optionally include one or more non-peptide bonds between one or more amino acid residues and/or amino acid analog residues, and optionally include one or more non-naturally-occurring amino acid residues or amino acid analog residues in addition to any which form the macrocycle. A “corresponding uncrosslinked polypeptide” when referred to in the context of a peptidomimetic macrocycle is understood to relate to a polypeptide of the same length as the macrocycle and comprising the equivalent natural amino acids of the wild type sequence corresponding to the macrocycle.

[0025] As used herein, the term “stability” refers to the maintenance of a defined secondary structure in solution by a peptidomimetic macrocycle of the invention as measured by circular dichroism, NMR or another biophysical measure, or resistance to proteolytic degradation in vitro or in vivo. Non-limiting examples of secondary structures contemplated in this invention are α-helices, β-turns, and β-pleated sheets.

[0026] As used herein, the term “helical stability” refers to the maintenance of a helical structure by a peptidomimetic macrocycle of the invention as measured by circular dichroism or NMR. For example, in some embodiments, the peptidomimetic macrocycles of the invention exhibit at least a 1.25, 1.5, 1.75 or 2-fold increase in α-helicity as determined by circular dichroism compared to a corresponding uncrosslinked macrocycle.

[0027] The term “α-amino acid” or simply “amino acid” refers to a molecule containing both an amino group and a carboxyl group bound to a carbon which is designated the α-carbon. Suitable amino acids include, without limitation, both the D- and L-isomers of the naturally-occurring amino acids, as well as non-naturally occurring amino acids prepared by organic synthesis or other metabolic routes. Unless the context specifically indicates otherwise, the term amino acid, as used herein, is intended to include amino acid analogs.

[0028] The term “naturally occurring amino acid” refers to any one of the twenty amino acids commonly found in peptides synthesized in nature, and known by the one letter abbreviations A, R, N, C, D, Q, E, G, H, I, L, K, M, F, P, S, T, W, Y and V.

[0029] The following table shows a summary of the properties of natural amino acids:

| | | | | Side-chain | Hydro- |
|---|---|---|---|---|---|
| | 3-Letter | 1-Letter | Side-chain | charge | pathy |
| Amino Acid | Code | Code | Polarity | (pH 7.4) | Index |
| Alanine | Ala | A | nonpolar | neutral | 1.8 |
| Arginine | Arg | R | polar | positive | −4.5 |
| Asparagine | Asn | N | polar | neutral | −3.5 |
| Aspartic acid | Asp | D | polar | negative | −3.5 |
| Cysteine | Cys | C | polar | neutral | 2.5 |
| Glutamic acid | Glu | E | polar | negative | −3.5 |
| Glutamine | Gln | Q | polar | neutral | −3.5 |
| Glycine | Gly | G | nonpolar | neutral | −0.4 |
| Histidine | His | H | polar | positive(10%) | −3.2 |
| | | | | neutral(90%) | |
| Isoleucine | Ile | I | nonpolar | neutral | 4.5 |
| Leucine | Leu | L | nonpolar | neutral | 3.8 |
| Lysine | Lys | K | polar | positive | −3.9 |
| Methionine | Met | M | nonpolar | neutral | 1.9 |
| Phenylalanine | Phe | F | nonpolar | neutral | 2.8 |
| Proline | Pro | P | nonpolar | neutral | −1.6 |
| Serine | Ser | S | polar | neutral | −0.8 |
| Threonine | Thr | T | polar | neutral | −0.7 |
| Tryptophan | Trp | W | nonpolar | neutral | −0.9 |
| Tyrosine | Tyr | Y | polar | neutral | −1.3 |
| Valine | Val | V | nonpolar | neutral | 4.2 |

[0030] “Hydrophobic amino acids” include, without limitation, small hydrophobic amino acids and large hydrophobic amino acids. “Small hydrophobic amino acids” are glycine, alanine, proline, and analogs thereof. “Large hydrophobic amino acids” are valine, leucine, isoleucine, phenylalanine, methionine, tryptophan, and analogs thereof. “Polar amino acids” are serine, threonine, asparagine, glutamine, cysteine, tyrosine, and analogs thereof. “Charged amino acids” are lysine, arginine, histidine, aspartate, glutamate, and analogs thereof.

[0031] The term “amino acid analog” refers to a molecule which is structurally similar to an amino acid and which can be substituted for an amino acid in the formation of a peptidomimetic macrocycle. Amino acid analogs include, without limitation, β-amino acids and amino acids where the amino or carboxy group is substituted by a similarly reactive group (e.g., substitution of the primary amine with a secondary or tertiary amine, or substitution of the carboxy group with an ester).

[0032] The term “amino acid analog” or “non-natural amino acid” refers to a molecule which is structurally similar to an amino acid and which can be substituted for an amino acid in the formation of a peptidomimetic macrocycle. Amino acid analogs include, without limitation, compounds which are structurally identical to an amino acid, as defined herein, except for the inclusion of one or more additional methylene groups between the amino and carboxyl group (e.g., α-amino β-carboxy acids), or for the substitution of the amino or carboxy group by a similarly reactive group (e.g., substitution of the primary amine with a secondary or tertiary amine, or substitution of the carboxy group with an ester). Non-natural amino acids include structures according to the following:

[chemical structure]

[chemical structure]

[chemical structure]

[chemical structure]

[chemical structure]

[chemical structure]

[0033] A “non-essential” amino acid residue is a residue that can be altered from the wild type sequence of a polypeptide without abolishing or substantially altering its essential biological or biochemical activity (e.g., receptor binding or activation). An “essential” amino acid residue is a residue that, when altered from the wild type sequence of the polypeptide, results in abolishing or substantially abolishing the polypeptide's essential biological or biochemical activity.

[0034] A “conservative amino acid substitution” is one in which the amino acid residue is replaced with an amino acid residue having a similar side chain. Families of amino acid residues having similar side chains have been defined in the art. These families include amino acids with basic side chains (e.g., K, R, H), acidic side chains (e.g., D, E), uncharged polar side chains (e.g., G, N, Q, S, T, Y, C), nonpolar side chains (e.g., A, V, L, I, P, F, M, W), beta-branched side chains (e.g., T, V, I) and aromatic side chains (e.g., Y, F, W, H). Thus, a predicted nonessential amino acid residue in a polypeptide, for example, is preferably replaced with another amino acid residue from the same side chain family. Other examples of acceptable substitutions are substitutions based on isosteric considerations (e.g. norleucine for methionine) or other properties (e.g. 2-thienylalanine for phenylalanine).

[0035] Amino acid analogs include β-amino acid analogs. Examples of β-amino acid analogs include, but are not limited to, the following: cyclic β-amino acid analogs; β-alanine; (R)-β-phenylalanine; (R)-1,2,3,4-tetrahydro-isoquinoline-3-acetic acid; (R)-3-amino-4-(1-naphthyl)-butyric acid; (R)-3-amino-4-(2,4-dichlorophenyl)butyric acid; (R)-3-amino-4-(2-chlorophenyl)-butyric acid; (R)-3-amino-4-(2-cyanophenyl)-butyric acid; (R)-3-amino-4-(2-fluorophenyl)-butyric acid; (R)-3-amino-4-(2-furyl)-butyric acid; (R)-3-amino-4-(2-methylphenyl)-butyric acid; (R)-3-amino-4-(2-naphthyl)-butyric acid; (R)-3-amino-4-(2-thienyl)-butyric acid; (R)-3-amino-4-(2-trifluoromethylphenyl)-butyric acid; (R)-3-amino-4-(3,4-dichlorophenyl)butyric acid; (R)-3-amino-4-(3,4-difluorophenyl)butyric acid; (R)-3-amino-4-(3-benzothienyl)-butyric acid; (R)-3-amino-4-(3-chlorophenyl)-butyric acid; (R)-3-amino-4-(3-cyanophenyl)-butyric acid; (R)-3-amino-4-(3-fluorophenyl)-butyric acid; (R)-3-amino-4-(3-methylphenyl)-butyric acid; (R)-3-amino-4-(3-pyridyl)-butyric acid; (R)-3-amino-4-(3-thienyl)-butyric acid; (R)-3-amino-4-(3-trifluoromethylphenyl)-butyric acid; (R)-3-amino-4-(4-bromophenyl)-butyric acid; (R)-3-amino-4-(4-chlorophenyl)-butyric acid; (R)-3-amino-4-(4-cyanophenyl)-butyric acid; (R)-3-amino-4-(4-fluorophenyl)-butyric acid; (R)-3-amino-4-(4-iodophenyl)-butyric acid; (R)-3-amino-4-(4-methylphenyl)-butyric acid; (R)-3-amino-4-(4-nitrophenyl)-butyric acid; (R)-3-amino-4-(4-pyridyl)-butyric acid; (R)-3-amino-4-(4-trifluoromethylphenyl)-butyric acid; (R)-3-amino-4-pentafluoro-phenylbutyric acid; (R)-3-amino-5-hexenoic acid; (R)-3-amino-5-hexynoic acid; (R)-3-amino-5-phenylpentanoic acid; (R)-3-amino-6-phenyl-5-hexenoic acid; (S)-1,2,3,4-tetrahydroisoquinoline-3-acetic acid; (S)-3-amino-4-(1-naphthyl)-butyric acid; (S)-3-amino-4-(2,4-dichlorophenyl)butyric acid; (S)-3-amino-4-(2-chlorophenyl)-butyric acid; (S)-3-amino-4-(2-cyanophenyl)-butyric acid; (S)-3-amino-4-(2-fluorophenyl)-butyric acid; (S)-3-amino-4-(2-furyl)-butyric acid; (S)-3-amino-4-(2-methylphenyl)-butyric acid; (S)-3-amino-4-(2-naphthyl)-butyric acid; (S)-3-amino-4-(2-thienyl)-butyric acid; (S)-3-amino-4-(2-trifluoromethylphenyl)-butyric acid; (S)-3-amino-4-(3,4-dichlorophenyl)butyric acid; (S)-3-amino-4-(3,4-difluorophenyl)butyric acid; (S)-3-amino-4-(3-benzothienyl)-butyric acid; (S)-3-amino-4-(3-chlorophenyl)-butyric acid; (S)-3-amino-4-(3-cyanophenyl)-butyric acid; (S)-3-amino-4-(3-fluorophenyl)-butyric acid; (S)-3-amino-4-(3-methylphenyl)-butyric acid; (S)-3-amino-4-(3-pyridyl)-butyric acid; (S)-3-amino-4-(3-thienyl)-butyric acid; (S)-3-amino-4-(3-trifluoromethylphenyl)-butyric acid; (S)-3-amino-4-(4-bromophenyl)-butyric acid; (S)-3-amino-4-(4-chlorophenyl)-butyric acid; (S)-3-amino-4-(4-cyanophenyl)-butyric acid; (S)-3-amino-4-(4-fluorophenyl)-butyric acid; (S)-3-amino-4-(4-iodophenyl)-butyric acid; (S)-3-amino-4-(4-methylphenyl)-butyric acid; (S)-3-amino-4-(4-nitrophenyl)-butyric acid; (S)-3-amino-4-(4-pyridyl)-butyric acid; (S)-3-amino-4-(4-trifluoromethylphenyl)-butyric acid; (S)-3-amino-4-pentafluoro-phenylbutyric acid; (S)-3-amino-5-hexenoic acid; (S)-3-amino-5-hexynoic acid; (S)-3-amino-5-phenylpentanoic acid; (S)-3-amino-6-phenyl-5-hexenoic acid; 1,2,5,6-tetrahydropyridine-3-carboxylic acid; 1,2,5,6-tetrahydropyridine-4-carboxylic acid; 3-amino-3-(2-chlorophenyl)-propionic acid; 3-amino-3-(2-thienyl)-propionic acid; 3-amino-3-(3-bromophenyl)-propionic acid; 3-amino-3-(4-chlorophenyl)-propionic acid; 3-amino-3-(4-methoxyphenyl)-propionic acid; 3-amino-4,4,4-trifluoro-butyric acid; 3-aminoadipic acid; D-β-phenylalanine; β-leucine; L-β-homoalanine; L-β-homoaspartic acid γ-benzyl ester; L-β-homoglutamic acid δ-benzyl ester; L-β-homoisoleucine; L-β-homoleucine; L-β-homomethionine; L-β-homophenylalanine; L-β-homoproline; L-β-homotryptophan; L-β-homovaline; L-Nω-benzyloxycarbonyl-β-homolysine; Nω-L-β-homoarginine; O-benzyl-L-β-homohydroxyproline; O-benzyl-L-β-homoserine; O-benzyl-L-β-homothreonine; O-benzyl-L-β-homotyrosine; γ-trityl-L-β-homoasparagine; (R)-β-phenylalanine; L-β-homoaspartic acid γ-t-butyl ester; L-β-homoglutamic acid δ-t-butyl ester; L-Nω-β-homolysine; Nδ-trityl-L-β-homoglutamine; Nω-2,2,4,6,7-pentamethyl-dihydrobenzofuran-5-sulfonyl-L-β-homoarginine; O-t-butyl-L-β-homohydroxy-proline; O-t-butyl-L-β-homoserine; O-t-butyl-L-β-homothreonine; O-t-butyl-L-β-homotyrosine; 2-aminocyclopentane carboxylic acid; and 2-aminocyclohexane carboxylic acid.

[0036] Amino acid analogs include analogs of alanine, valine, glycine or leucine. Examples of amino acid analogs of alanine, valine, glycine, and leucine include, but are not limited to, the following: α-methoxyglycine; α-allyl-L-alanine; α-aminoisobutyric acid; α-methyl-leucine; β-(1-naphthyl)-D-alanine; β-(1-naphthyl)-L-alanine; β-(2-naphthyl)-D-alanine; β-(2-naphthyl)-L-alanine; β-(2-pyridyl)-D-alanine; β-(2-pyridyl)-L-alanine; β-(2-thienyl)-D-alanine; β-(2-thienyl)-L-alanine; β-(3-benzothienyl)-D-alanine; β-(3-benzothienyl)-L-alanine; β-(3-pyridyl)-D-alanine; β-(3-pyridyl)-L-alanine; β-(4-pyridyl)-D-alanine; β-(4-pyridyl)-L-alanine; β-chloro-L-alanine; β-cyano-L-alanin; β-cyclohexyl-D-alanine; β-cyclohexyl-L-alanine; β-cyclopenten-1-yl-alanine; β-cyclopentyl-alanine; β-cyclopropyl-L-Ala-OH.dicyclohexylammonium salt; β-t-butyl-D-alanine; β-t-butyl-L-alanine; γ-aminobutyric acid; L-α,β-diaminopropionic acid; 2,4-dinitro-phenylglycine; 2,5-dihydro-D-phenylglycine; 2-amino-4,4,4-trifluorobutyric acid; 2-fluoro-phenylglycine; 3-amino-4,4,4-trifluorobutyric acid; 3-fluoro-valine; 4,4,4-trifluoro-valine; 4,5-dehydro-L-leu-OH.dicyclohexylammonium salt; 4-fluoro-D-phenylglycine; 4-fluoro-L-phenylglycine; 4-hydroxy-D-phenylglycine; 5,5,5-trifluoro-leucine; 6-aminohexanoic acid; cyclopentyl-D-Gly-OH-dicyclohexylammonium salt; cyclopentyl-Gly-OH-dicyclohexylammonium salt; D-α,β-diaminopropionic acid; D-α-aminobutyric acid; D-α-t-butylglycine; D-(2-thienyl)glycine; D-(3-thienyl)glycine; D-2-aminocaproic acid; D-2-indanylglycine; D-allylglycine-dicyclohexylammonium salt; D-cyclohexylglycine; D-norvaline; D-phenylglycine; O-aminobutyric acid; O-aminoisobutyric acid; (2-bromophenyl)glycine; (2-methoxyphenyl)glycine; (2-methylphenyl)glycine; (2-thiazoyl)glycine; (2-thienyl)glycine; 2-amino-3-(dimethylamino)-propionic acid; L-α,β-diaminopropionic acid; L-α-aminobutyric acid; L-α-t-butylglycine; L-β-thienyl)glycine; L-2-amino-3-(dimethylamino)-propionic acid; L-2-aminocaproic acid dicyclohexyl-ammonium salt; L-2-indanylglycine; L-allylglycine-dicyclohexyl ammonium salt; L-cyclohexylglycine; L-phenylglycine; L-propargylglycine; L-norvaline; N-α-aminomethyl-L-alanine; D-α,γ-diaminobutyric acid; L-α,γ-diaminobutyric acid; β-cyclopropyl-L-alanine; (N-β-(2,4-dinitrophenyl))-L-α,β-diaminopropionic acid; (N-β-1-(4,4-dimethyl-2,6-dioxocyclohex-1-ylidene)ethyl)-D-α,β-diaminopropionic acid; (N-β-1-(4,4-dimethyl-2,6-dioxocyclohex-1-ylidene)ethyl)-L-α,β-diaminopropionic acid; (N-β-4-methyltrityl)-L-α,β-diaminopropionic acid; (N-β-allyloxycarbonyl)-L-α,β-diaminopropionic acid; (N-γ-1-(4,4-dimethyl-2,6-dioxocyclohex-1-ylidene)ethyl)-D-α,γ-diaminobutyric acid; (N-γ-1-(4,4-dimethyl-2,6-dioxocyclohex-1-ylidene)ethyl)-L-α,γ-diaminobutyric acid; (N-γ-4-methyltrityl)-D-α,γ-diaminobutyric acid; (N-γ-4-methyltrityl)-L-α,γ-diaminobutyric acid; (N-γ-allyloxycarbonyl)-L-α,γ-diaminobutyric acid; D-α,γ-diaminobutyric acid; 4,5-dehydro-L-leucine; cyclopentyl-D-Gly-OH; cyclopentyl-Gly-OH; D-allylglycine; D-homocyclohexylalanine; L-1-pyrenylalanine; L-2-aminocaproic acid; L-allylglycine; L-homocyclohexylalanine; and N-(2-hydroxy-4-methoxy-Bzl)-Gly-OH.

[0037] Amino acid analogs further include analogs of arginine or lysine. Examples of amino acid analogs of arginine and lysine include, but are not limited to, the following: citrulline; L-2-amino-3-guanidinopropionic acid; L-2-amino-3-ureidopropionic acid; L-citrulline; Lys(Me)₂-OH; Lys(N₃)—OH; Nδ-benzyloxycarbonyl-L-ornithine; Nω-nitro-D-arginine; Nω-nitro-L-arginine; α-methyl-ornithine; 2,6-diaminoheptanedioic acid; L-ornithine; (Nδ-1-(4,4-dimethyl-2,6-dioxo-cyclohex-1-ylidene)ethyl)-D-ornithine; (Nδ-1-(4,4-dimethyl-2,6-dioxo-cyclohex-1-ylidene)ethyl)-L-ornithine; (Nδ-4-methyltrityl)-D-ornithine; (Nδ-4-methyltrityl)-L-ornithine; D-ornithine; L-ornithine; Arg(Me)(Pbf)-OH; Arg(Me)₂-OH (asymmetrical); Arg(Me)2-OH (symmetrical); Lys(ivDde)-OH; Lys(Me)2-OH.HCl; Lys(Me3)-OH chloride; Nω-nitro-D-arginine; and Nω-nitro-L-arginine.

[0038] Amino acid analogs include analogs of aspartic or glutamic acids. Examples of amino acid analogs of aspartic and glutamic acids include, but are not limited to, the following: α-methyl-D-aspartic acid; α-methyl-glutamic acid; α-methyl-L-aspartic acid; γ-methylene-glutamic acid; (N-γ-ethyl)-L-glutamine; [N-α-(4-aminobenzoyl)]-L-glutamic acid; 2,6-diaminopimelic acid; L-α-aminosuberic acid; D-2-aminoadipic acid; D-α-aminosuberic acid; α-aminopimelic acid; iminodiacetic acid; L-2-amino adipic acid; threo-β-methyl-aspartic acid; γ-carboxy-D-glutamic acid γ,γ-di-t-butyl ester; γ-carboxy-L-glutamic acid γ,γ-di-t-butyl ester; Glu(OAll)-OH; L-Asu(OtBu)-OH; and pyroglutamic acid.

[0039] Amino acid analogs include analogs of cysteine and methionine. Examples of amino acid analogs of cysteine and methionine include, but are not limited to, Cys(farnesyl)-OH, Cys(farnesyl)-OMe, α-methyl-methionine, Cys(2-hydroxyethyl)-OH, Cys(3-aminopropyl)-OH, 2-amino-4-(ethylthio)butyric acid, buthionine, buthioninesulfoximine, ethionine, methionine methylsulfonium chloride, selenomethionine, cysteic acid, [2-(4-pyridyl)ethyl]-DL-penicillamine, [2-(4-pyridyl)ethyl]-L-cysteine, 4-methoxybenzyl-D-penicillamine, 4-methoxybenzyl-L-penicillamine, 4-methylbenzyl-D-penicillamine, 4-methylbenzyl-L-penicillamine, benzyl-D-cysteine, benzyl-L-cysteine, benzyl-DL-homocysteine, carbamoyl-L-cysteine, carboxyethyl-L-cysteine, carboxymethyl-L-cysteine, diphenylmethyl-L-cysteine, ethyl-L-cysteine, methyl-L-cysteine, t-butyl-D-cysteine, trityl-L-homocysteine, trityl-D-penicillamine, cystathionine, homocystine, L-homocystine, (2-aminoethyl)-L-cysteine, seleno-L-cystine, cystathionine, Cys(StBu)-OH, and acetamidomethyl-D-penicillamine.

[0040] Amino acid analogs include analogs of phenylalanine and tyrosine. Examples of amino acid analogs of phenylalanine and tyrosine include β-methyl-phenylalanine, β-hydroxyphenylalanine, α-methyl-3-methoxy-DL-phenylalanine, α-methyl-D-phenylalanine, α-methyl-L-phenylalanine, 1,2,3,4-tetrahydroisoquinoline-3-carboxylic acid, 2,4-dichloro-phenylalanine, 2-(trifluoromethyl)-D-phenylalanine, 2-(trifluoromethyl)-L-phenylalanine, 2-bromo-D-phenylalanine, 2-bromo-L-phenylalanine, 2-chloro-D-phenylalanine, 2-chloro-L-phenylalanine, 2-cyano-D-phenylalanine, 2-cyano-L-phenylalanine, 2-fluoro-D-phenylalanine, 2-fluoro-L-phenylalanine, 2-methyl-D-phenylalanine, 2-methyl-L-phenylalanine, 2-nitro-D-phenylalanine, 2-nitro-L-phenylalanine, 2;4;5-trihydroxy-phenylalanine, 3,4,5-trifluoro-D-phenylalanine, 3,4,5-trifluoro-L-phenylalanine, 3,4-dichloro-D-phenylalanine, 3,4-dichloro-L-phenylalanine, 3,4-difluoro-D-phenylalanine, 3,4-difluoro-L-phenylalanine, 3,4-dihydroxy-L-phenylalanine, 3,4-dimethoxy-L-phenylalanine, 3,5,3′-triiodo-L-thyronine, 3,5-diiodo-D-tyrosine, 3,5-diiodo-L-tyrosine, 3,5-diiodo-L-thyronine, 3-(trifluoromethyl)-D-phenylalanine, 3-(trifluoromethyl)-L-phenylalanine, 3-amino-L-tyrosine, 3-bromo-D-phenylalanine, 3-bromo-L-phenylalanine, 3-chloro-D-phenylalanine, 3-chloro-L-phenylalanine, 3-chloro-L-tyrosine, 3-cyano-D-phenylalanine, 3-cyano-L-phenylalanine, 3-fluoro-D-phenylalanine, 3-fluoro-L-phenylalanine, 3-fluoro-tyrosine, 3-iodo-D-phenylalanine, 3-iodo-L-phenylalanine, 3-iodo-L-tyrosine, 3-methoxy-L-tyrosine, 3-methyl-D-phenylalanine, 3-methyl-L-phenylalanine, 3-nitro-D-phenylalanine, 3-nitro-L-phenylalanine, 3-nitro-L-tyrosine, 4-(trifluoromethyl)-D-phenylalanine, 4-(trifluoromethyl)-L-phenylalanine, 4-amino-D-phenylalanine, 4-amino-L-phenylalanine, 4-benzoyl-D-phenylalanine, 4-benzoyl-L-phenylalanine, 4-bis(2-chloroethyl)amino-L-phenylalanine, 4-bromo-D-phenylalanine, 4-bromo-L-phenylalanine, 4-chloro-D-phenylalanine, 4-chloro-L-phenylalanine, 4-cyano-D-phenylalanine, 4-cyano-L-phenylalanine, 4-fluoro-D-phenylalanine, 4-fluoro-L-phenylalanine, 4-iodo-D-phenylalanine, 4-iodo-L-phenylalanine, homophenylalanine, thyroxine, 3,3-diphenylalanine, thyronine, ethyl-tyrosine, and methyl-tyrosine.

[0041] Amino acid analogs include analogs of proline. Examples of amino acid analogs of proline include, but are not limited to, 3,4-dehydro-proline, 4-fluoro-proline, cis-4-hydroxy-proline, thiazolidine-2-carboxylic acid, and trans-4-fluoro-proline.

[0042] Amino acid analogs include analogs of serine and threonine. Examples of amino acid analogs of serine and threonine include, but are not limited to, 3-amino-2-hydroxy-5-methylhexanoic acid, 2-amino-3-hydroxy-4-methylpentanoic acid, 2-amino-3-ethoxybutanoic acid, 2-amino-3-methoxybutanoic acid, 4-amino-3-hydroxy-6-methylheptanoic acid, 2-amino-3-benzyloxypropionic acid, 2-amino-3-benzyloxypropionic acid, 2-amino-3-ethoxypropionic acid, 4-amino-3-hydroxybutanoic acid, and α-methylserine.

[0043] Amino acid analogs include analogs of tryptophan. Examples of amino acid analogs of tryptophan include, but are not limited to, the following: α-methyl-tryptophan; β-(3-benzothienyl)-D-alanine; β-(3-benzothienyl)-L-alanine; 1-methyl-tryptophan; 4-methyl-tryptophan; 5-benzyloxy-tryptophan; 5-bromo-tryptophan; 5-chloro-tryptophan; 5-fluoro-tryptophan; 5-hydroxy-tryptophan; 5-hydroxy-L-tryptophan; 5-methoxy-tryptophan; 5-methoxy-L-tryptophan; 5-methyl-tryptophan; 6-bromo-tryptophan; 6-chloro-D-tryptophan; 6-chloro-tryptophan; 6-fluoro-tryptophan; 6-methyl-tryptophan; 7-benzyloxy-tryptophan; 7-bromo-tryptophan; 7-methyl-tryptophan; D-1,2,3,4-tetrahydro-norharman-3-carboxylic acid; 6-methoxy-1,2,3,4-tetrahydronorharman-1-carboxylic acid; 7-azatryptophan; L-1,2,3,4-tetrahydro-norharman-3-carboxylic acid; 5-methoxy-2-methyl-tryptophan; and 6-chloro-L-tryptophan.

[0044] In some embodiments, amino acid analogs are racemic. In some embodiments, the D isomer of the amino acid analog is used. In some embodiments, the L isomer of the amino acid analog is used. In other embodiments, the amino acid analog comprises chiral centers that are in the R or S configuration. In still other embodiments, the amino group(s) of a β-amino acid analog is substituted with a protecting group, e.g., tert-butyloxycarbonyl (BOC group), 9-fluorenylmethyloxycarbonyl (FMOC), tosyl, and the like. In yet other embodiments, the carboxylic acid functional group of a β-amino acid analog is protected, e.g., as its ester derivative. In some embodiments the salt of the amino acid analog is used.

[0045] The term “capping group” refers to the chemical moiety occurring at either the carboxy or amino terminus of the polypeptide chain of the subject peptidomimetic macrocycle. The capping group of a carboxy terminus includes an unmodified carboxylic acid (ie —COOH) or a carboxylic acid with a substituent. For example, the carboxy terminus may be substituted with an amino group to yield a carboxamide at the C-terminus. Various substituents include but are not limited to primary and secondary amines, including pegylated secondary amines. Representative secondary amine capping groups for the C-terminus include:

[chemical structure]

[chemical structure]

[0046] The capping group of an amino terminus includes an unmodified amine (i.e. —NH₂) or an amine with a substituent. For example, the amino terminus may be substituted with an acyl group to yield a carboxamide at the N-terminus. Various substituents include but are not limited to substituted acyl groups, including C₁-C₆ carbonyls, C₇-C₃₀ carbonyls, and pegylated carbamates. Representative capping groups for the N-terminus include:

[chemical structure]

[0047] The term “member” as used herein in conjunction with macrocycles or macrocycle-forming linkers refers to the atoms that form or can form the macrocycle, and excludes substituent or side chain atoms. By analogy, cyclodecane, 1,2-difluoro-decane and 1,3-dimethyl cyclodecane are all considered ten-membered macrocycles as the hydrogen or fluoro substituents or methyl side chains do not participate in forming the macrocycle.

[0048] The symbol “ [symbol] ” when used as part of a molecular structure refers to a single bond or a trans or cis double bond.

[0049] The term “amino acid side chain” refers to a moiety attached to the α-carbon in an amino acid. For example, the amino acid side chain for alanine is methyl, the amino acid side chain for phenylalanine is phenylmethyl, the amino acid side chain for cysteine is thiomethyl, the amino acid side chain for aspartate is carboxymethyl, the amino acid side chain for tyrosine is 4-hydroxyphenylmethyl, etc. Other non-naturally occurring amino acid side chains are also included, for example, those that occur in nature (e.g., an amino acid metabolite) or those that are made synthetically (e.g., an α,α di-substituted amino acid).

[0050] The term “α,α di-substituted amino” acid refers to a molecule or moiety containing both an amino group and a carboxyl group bound to a carbon (the α-carbon) that is attached to two natural or non-natural amino acid side chains.

[0051] The term “polypeptide” encompasses two or more naturally or non-naturally-occurring amino acids joined by a covalent bond (e.g., an amide bond). Polypeptides as described herein include full length proteins (e.g., fully processed proteins) as well as shorter amino acid sequences (e.g., fragments of naturally-occurring proteins or synthetic polypeptide fragments).

[0052] The term “first C-terminal amino acid” refers to the amino acid which is closest to the C-terminus. The term “second C-terminal amino acid” refers to the amino acid attached at the N-terminus of the first C-terminal amino acid.

[0053] The term “macrocyclization reagent” or “macrocycle-forming reagent” as used herein refers to any reagent which may be used to prepare a peptidomimetic macrocycle of the invention by mediating the reaction between two reactive groups. Reactive groups may be, for example, an azide and alkyne, in which case macrocyclization reagents include, without limitation, Cu reagents such as reagents which provide a reactive Cu(I) species, such as CuBr, CuI or CuOTf, as well as Cu(II) salts such as Cu(CO₂CH₃)₂, CuSO₄, and CuCl₂ that can be converted in situ to an active Cu(I) reagent by the addition of a reducing agent such as ascorbic acid or sodium ascorbate. Macrocyclization reagents may additionally include, for example, Ru reagents known in the art such as Cp*RuCl(PPh₃)₂, [Cp*RuCl]₄ or other Ru reagents which may provide a reactive Ru(II) species. In other cases, the reactive groups are terminal olefins. In such embodiments, the macrocyclization reagents or macrocycle-forming reagents are metathesis catalysts including, but not limited to, stabilized, late transition metal carbene complex catalysts such as Group VIII transition metal carbene catalysts. For example, such catalysts are Ru and Os metal centers having a +2 oxidation state, an electron count of 16 and pentacoordinated. Additional catalysts are disclosed in Grubbs et al., “Ring Closing Metathesis and Related Processes in Organic Synthesis” Acc. Chem. Res. 1995, 28, 446-452, and U.S. Pat. No. 5,811,515. In yet other cases, the reactive groups are thiol groups. In such embodiments, the macrocyclization reagent is, for example, a linker functionalized with two thiol-reactive groups such as halogen groups.

[0054] The term “halo” or “halogen” refers to fluorine, chlorine, bromine or iodine or a radical thereof.

[0055] The term “alkyl” refers to a hydrocarbon chain that is a straight chain or branched chain, containing the indicated number of carbon atoms. For example, C₁-C₁₀ indicates that the group has from 1 to 10 (inclusive) carbon atoms in it. In the absence of any numerical designation, “alkyl” is a chain (straight or branched) having 1 to 20 (inclusive) carbon atoms in it.

[0056] The term “alkylene” refers to a divalent alkyl (i.e., —R—).

[0057] The term “alkenyl” refers to a hydrocarbon chain that is a straight chain or branched chain having one or more carbon-carbon double bonds. The alkenyl moiety contains the indicated number of carbon atoms. For example, C₂-C₁₀ indicates that the group has from 2 to 10 (inclusive) carbon atoms in it. The term “lower alkenyl” refers to a C₂-C₆ alkenyl chain. In the absence of any numerical designation, “alkenyl” is a chain (straight or branched) having 2 to 20 (inclusive) carbon atoms in it.

[0058] The term “alkynyl” refers to a hydrocarbon chain that is a straight chain or branched chain having one or more carbon-carbon triple bonds. The alkynyl moiety contains the indicated number of carbon atoms. For example, C₂-C₁₀ indicates that the group has from 2 to 10 (inclusive) carbon atoms in it. The term “lower alkynyl” refers to a C₂-C₆ alkynyl chain. In the absence of any numerical designation, “alkynyl” is a chain (straight or branched) having 2 to 20 (inclusive) carbon atoms in it.

[0059] The term “aryl” refers to a 6-carbon monocyclic or 10-carbon bicyclic aromatic ring system wherein 0, 1, 2, 3, or 4 atoms of each ring are substituted by a substituent. Examples of aryl groups include phenyl, naphthyl and the like. The term “arylalkyl” or the term “aralkyl” refers to alkyl substituted with an aryl. The term “arylalkoxy” refers to an alkoxy substituted with aryl.

[0060] “Arylalkyl” refers to an aryl group, as defined above, wherein one of the aryl group's hydrogen atoms has been replaced with a C₁-C₅ alkyl group, as defined above. Representative examples of an arylalkyl group include, but are not limited to, 2-methylphenyl, 3-methylphenyl, 4-methylphenyl, 2-ethylphenyl, 3-ethylphenyl, 4-ethylphenyl, 2-propylphenyl, 3-propylphenyl, 4-propylphenyl, 2-butylphenyl, 3-butylphenyl, 4-butylphenyl, 2-pentylphenyl, 3-pentylphenyl, 4-pentylphenyl, 2-isopropylphenyl, 3-isopropylphenyl, 4-isopropylphenyl, 2-isobutylphenyl, 3-isobutylphenyl, 4-isobutylphenyl, 2-sec-butylphenyl, 3-sec-butylphenyl, 4-sec-butylphenyl, 2-t-butylphenyl, 3-t-butylphenyl and 4-t-butylphenyl.

[0061] “Arylamido” refers to an aryl group, as defined above, wherein one of the aryl group's hydrogen atoms has been replaced with one or more —C(O)NH₂ groups. Representative examples of an arylamido group include 2-C(O)NH₂-phenyl, 3-C(O)NH₂-phenyl, 4-C(O)NH₂-phenyl, 2-C(O)NH₂-pyridyl, 3-C(O)NH₂-pyridyl, and 4-C(O)NH₂-pyridyl,

[0062] “Alkylheterocycle” refers to a C₁-C₅ alkyl group, as defined above, wherein one of the C₁-C₅ alkyl group's hydrogen atoms has been replaced with a heterocycle. Representative examples of an alkylheterocycle group include, but are not limited to, —CH₂CH₂-morpholine, —CH₂CH₂-piperidine, —CH₂CH₂CH₂-morpholine, and —CH₂CH₂CH₂-imidazole.

[0063] “Alkylamido” refers to a C₁-C₅ alkyl group, as defined above, wherein one of the C₁-C₅ alkyl group's hydrogen atoms has been replaced with a —C(O)NH₂ group. Representative examples of an alkylamido group include, but are not limited to, —CH₂—C(O)NH₂, —CH₂CH₂—C(O)NH₂, —CH₂CH₂CH₂C(O)NH₂, —CH₂CH₂CH₂CH₂C(O)NH₂, —CH₂CH₂CH₂CH₂CH₂C(O)NH₂, —CH₂CH(C(O)NH₂)CH₃, —CH₂CH(C(O)NH₂)CH₂CH₃, —CH(C(O)NH₂)CH₂CH₃, —C(CH₃)₂CH₂C(O)NH₂, —CH₂—CH₂—NH—C(O)—CH₃, —CH₂—CH₂—NH—C(O)—CH₃—CH3, and —CH₂—CH₂—NH—C(O)—CH═CH₂.

[0064] “Alkanol” refers to a C₁-C₅ alkyl group, as defined above, wherein one of the C₁-C₅ alkyl group's hydrogen atoms has been replaced with a hydroxyl group. Representative examples of an alkanol group include, but are not limited to, —CH₂OH, —CH₂CH₂OH, —CH₂CH₂CH₂OH, —CH₂CH₂CH₂CH₂OH, —CH₂CH₂CH₂ CH₂CH₂OH, —CH₂CH(OH)CH₃, —CH₂CH(OH)CH₂CH₃, —CH(OH)CH₃ and —C(CH₃)₂CH₂OH.

[0065] “Alkylcarboxy” refers to a C₁-C₅ alkyl group, as defined above, wherein one of the C₁-C₅ alkyl group's hydrogen atoms has been replaced with a —COOH group. Representative examples of an alkylcarboxy group include, but are not limited to, —CH₂COOH, —CH₂CH₂COOH, —CH₂CH₂CH₂COOH, —CH₂CH₂CH₂CH₂COOH, —CH₂CH(COOH)CH₃, —CH₂CH₂CH₂CH₂CH₂COOH, —CH₂CH(COOH)CH₂CH₃, —CH(COOH)CH₂CH₃ and —C(CH₃)₂CH₂COOH.

[0066] The term “cycloalkyl” as employed herein includes saturated and partially unsaturated cyclic hydrocarbon groups having 3 to 12 carbons, preferably 3 to 8 carbons, and more preferably 3 to 6 carbons, wherein the cycloalkyl group additionally is optionally substituted. Some cycloalkyl groups include, without limitation, cyclopropyl, cyclobutyl, cyclopentyl, cyclopentenyl, cyclohexyl, cyclohexenyl, cycloheptyl, and cyclooctyl.

[0067] The term “heteroaryl” refers to an aromatic 5-8 membered monocyclic, 8-12 membered bicyclic, or 11-14 membered tricyclic ring system having 1-3 heteroatoms if monocyclic, 1-6 heteroatoms if bicyclic, or 1-9 heteroatoms if tricyclic, said heteroatoms selected from O, N, or S (e.g., carbon atoms and 1-3, 1-6, or 1-9 heteroatoms of O, N, or S if monocyclic, bicyclic, or tricyclic, respectively), wherein 0, 1, 2, 3, or 4 atoms of each ring are substituted by a substituent. Examples of heteroaryl groups include pyridyl, furyl or furanyl, imidazolyl, benzimidazolyl, pyrimidinyl, thiophenyl or thienyl, quinolinyl, indolyl, thiazolyl, and the like.

[0068] The term “heteroarylalkyl” or the term “heteroaralkyl” refers to an alkyl substituted with a heteroaryl. The term “heteroarylalkoxy” refers to an alkoxy substituted with heteroaryl.

[0069] The term “heteroarylalkyl” or the term “heteroaralkyl” refers to an alkyl substituted with a heteroaryl. The term “heteroarylalkoxy” refers to an alkoxy substituted with heteroaryl.

[0070] The term “heterocyclyl” refers to a nonaromatic 5-8 membered monocyclic, 8-12 membered bicyclic, or 11-14 membered tricyclic ring system having 1-3 heteroatoms if monocyclic, 1-6 heteroatoms if bicyclic, or 1-9 heteroatoms if tricyclic, said heteroatoms selected from O, N, or S (e.g., carbon atoms and 1-3, 1-6, or 1-9 heteroatoms of O, N, or S if monocyclic, bicyclic, or tricyclic, respectively), wherein 0, 1, 2 or 3 atoms of each ring are substituted by a substituent. Examples of heterocyclyl groups include piperazinyl, pyrrolidinyl, dioxanyl, morpholinyl, tetrahydrofuranyl, and the like.

[0071] The term “substituent” refers to a group replacing a second atom or group such as a hydrogen atom on any molecule, compound or moiety. Suitable substituents include, without limitation, halo, hydroxy, mercapto, oxo, nitro, haloalkyl, alkyl, alkaryl, aryl, aralkyl, alkoxy, thioalkoxy, aryloxy, amino, alkoxycarbonyl, amido, carboxy, alkanesulfonyl, alkylcarbonyl, and cyano groups.

[0072] In some embodiments, one or more compounds of this invention contain one or more asymmetric centers and thus occur as racemates and racemic mixtures, single enantiomers, individual diastereomers and diastereomeric mixtures. In one embodiment, isomeric forms of these compounds are included in the present invention unless expressly provided otherwise. In some embodiments, one or more compounds of this invention are also represented in multiple tautomeric forms, in such instances, one or more compounds of the invention includes all tautomeric forms of the compounds described herein (e.g., if alkylation of a ring system results in alkylation at multiple sites, one or more compounds of the invention includes all such reaction products). All such isomeric forms of such compounds are included in the present invention unless expressly provided otherwise. All crystal forms of the compounds described herein are included in the present invention unless expressly provided otherwise.

[0073] As used herein, the terms “increase” and “decrease” mean, respectively, to cause a statistically significantly (i.e., p<0.1) increase or decrease of at least 5%.

[0074] As used herein, the recitation of a numerical range for a variable is intended to convey that the invention can be practiced with the variable equal to any of the values within that range. Thus, for a variable which is inherently discrete, the variable is equal to any integer value within the numerical range, including the end-points of the range. Similarly, for a variable which is inherently continuous, the variable is equal to any real value within the numerical range, including the end-points of the range. As an example, and without limitation, a variable which is described as having values between 0 and 2 takes the values 0, 1 or 2 if the variable is inherently discrete, and takes the values 0.0, 0.1, 0.01, 0.001, or any other real values ≧0 and ≦2 if the variable is inherently continuous.

[0075] As used herein, unless specifically indicated otherwise, the word “or” is used in the inclusive sense of “and/or” and not the exclusive sense of “either/or.”

[0076] The term “on average” represents the mean value derived from performing at least three independent replicates for each data point.

[0077] The term “biological activity” encompasses structural and functional properties of a macrocycle of the invention. Biological activity is, for example, structural stability, alpha-helicity, affinity for a target, resistance to proteolytic degradation, cell penetrability, intracellular stability, in vivo stability, or any combination thereof.

[0078] The term “binding affinity” refers to the strength of a binding interaction, for example between a peptidomimetic macrocycle and a target. Binding affinity can be expressed, for example, as an equilibrium dissociation constant (“K_{D}”), which is expressed in units which are a measure of concentration (e.g. M, mM, μM, nM etc). Numerically, binding affinity and K_{D} values vary inversely, such that a lower binding affinity corresponds to a higher K_{D} value, while a higher binding affinity corresponds to a lower K_{D} value. Where high binding affinity is desirable, “improved” binding affinity refers to higher binding affinity and therefore lower K_{D} values.

[0079] The term “ratio of binding affinities” refers to the ratio of dissociation constants (K_{D} values) of a first binding interaction (the numerator), versus a second binding interaction (denominator). Consequently, a “reduced ratio of binding affinities” to Target 1 versus Target 2 refers to a lower value for the ratio expressed as K_{D}(Target 1)/K_{D}(Target 2). This concept can also be characterized as “improved selectivity” for Target 1 versus Target 2, which can be due either to a decrease in the K_{D} value for Target 1 or an increase in the value for the K_{D} value for Target 2.

[0080] The term “in vitro efficacy” refers to the extent to which a test compound, such as a peptidomimetic macrocycle, produces a beneficial result in an in vitro test system or assay. In vitro efficacy can be measured, for example, as an “IC₅₀” or “EC₅₀” value, which represents the concentration of the test compound which produces 50% of the maximal effect in the test system.

[0081] The term “ratio of in vitro efficacies” or “in vitro efficacy ratio” refers to the ratio of IC₅₀ or EC₅₀ values from a first assay (the numerator) versus a second assay (the denominator). Consequently, an improved in vitro efficacy ratio for Assay 1 versus Assay 2 refers to a lower value for the ratio expressed as IC₅₀(Assay 1)/IC₅₀(Assay 2) or alternatively as EC₅₀(Assay 1)/EC₅₀(Assay 2). This concept can also be characterized as “improved selectivity” in Assay 1 versus Assay 2, which can be due either to a decrease in the IC₅₀ or EC₅₀ value for Target 1 or an increase in the value for the IC₅₀ or EC₅₀ value for Target 2.

[0082] The details of one or more particular embodiments of the invention are set forth in the accompanying drawings and the description below. Other features, objects, and advantages of the invention will be apparent from the description and drawings, and from the claims.

[0083] In some embodiments, the peptide sequences are derived from the p53 protein.

[0084] A non-limiting exemplary list of suitable p53 peptides for use in the present invention is given below.

TABLE 1
(SEQ ID NOS 1-18, respectively, in order of appearance)

| Sequence (bold = critical residue; X = cross-linked amino acid) | | | | | | | | | | | | | | | | | | | Design Notes |
|---|---|---|---|---|---|---|---|---|---|---|---|---|---|---|---|---|---|---|---|
| Ac- | | Gln | Ser | Gln | Gln | Thr | Phe | Ser | Asn | Leu | Trp | Arg | Leu | Leu | Pro | Gln | Asn | -NH2 | linear |
| Ac- | X | Gln | Ser | Gln | X | Thr | Phe | Ser | Asn | Leu | Trp | Arg | Leu | Leu | Pro | Gln | Asn | -NH2 | i-> i + 4 |
| | | | | | | | | | | | | | | | | | | | x-link #1 |
| Ac- | | X | Ser | Gln | Gln | X | Phe | Ser | Asn | Leu | Trp | Arg | Leu | Leu | Pro | Gln | Asn | -NH2 | i-> i + 4 |
| | | | | | | | | | | | | | | | | | | | x-link #2 |
| Ac- | | Gln | Ser | X | Gln | Thr | Phe | X | Asn | Leu | Trp | Arg | Leu | Leu | Pro | Gln | Asn | -NH2 | i-> i + 4 |
| | | | | | | | | | | | | | | | | | | | x-link #3 |
| Ac- | | Gln | Ser | Gln | X | Thr | Phe | Ser | X | Leu | Trp | Arg | Leu | Leu | Pro | Gln | Asn | -NH2 | i-> i + 4 |
| | | | | | | | | | | | | | | | | | | | x-link #4 |
| Ac- | | Gln | Ser | Gln | Gln | X | Phe | Ser | Asn | X | Trp | Arg | Leu | Leu | Pro | Gln | Asn | -NH2 | i-> i + 4 |
| | | | | | | | | | | | | | | | | | | | x-link #5 |
| Ac- | | Gln | Ser | Gln | Gln | Thr | Phe | X | Asn | Leu | Trp | X | Leu | Leu | Pro | Gln | Asn | -NH2 | i-> i + 4 |
| | | | | | | | | | | | | | | | | | | | x-link #6 |
| Ac- | | Gln | Ser | Gln | Gln | Thr | Phe | Ser | X | Leu | Trp | Arg | X | Leu | Pro | Gln | Asn | -NH2 | i-> i + 4 |
| | | | | | | | | | | | | | | | | | | | x-link #7 |
| Ac- | | Gln | Ser | Gln | Gln | Thr | Phe | Ser | Asn | Leu | Trp | X | Leu | Leu | Pro | X | Asn | -NH2 | i-> i + 4 |
| | | | | | | | | | | | | | | | | | | | x-link #8 |
| Ac- | | Gln | Ser | Gln | Gln | Thr | Phe | Ser | Asn | Leu | Trp | Arg | X | Leu | Pro | Gln | X | -NH2 | i-> i + 4 |
| | | | | | | | | | | | | | | | | | | | x-link #9 |
| Ac- | X | Gln | Ser | Gln | Gln | Thr | Phe | X | Asn | Leu | Trp | Arg | Leu | Leu | Pro | Gln | Asn | -NH2 | i-> i + 7 |
| | | | | | | | | | | | | | | | | | | | x-link #1 |
| Ac- | | X | Ser | Gln | Gln | Thr | Phe | Ser | X | Leu | Trp | Arg | Leu | Leu | Pro | Gln | Asn | -NH2 | i-> i + 7 |
| | | | | | | | | | | | | | | | | | | | x-link #2 |
| Ac- | | Gln | X | Gln | Gln | Thr | Phe | Ser | Asn | X | Trp | Arg | Leu | Leu | Pro | Gln | Asn | -NH2 | i-> i + 7 |
| | | | | | | | | | | | | | | | | | | | x-link #3 |
| Ac- | | Gln | Ser | Gln | X | Thr | Phe | Ser | Asn | Leu | Trp | X | Leu | Leu | Pro | Gln | Asn | -NH2 | i-> i + 7 |
| | | | | | | | | | | | | | | | | | | | x-link #4 |
| Ac- | | Gln | Ser | Gln | Gln | X | Phe | Ser | Asn | Leu | Trp | Arg | X | Leu | Pro | Gln | Asn | -NH2 | i-> i + 7 |
| | | | | | | | | | | | | | | | | | | | x-link #5 |
| Ac- | | Gln | Ser | Gln | Gln | Thr | Phe | X | Asn | Leu | Trp | Arg | Leu | Leu | X | Gln | Asn | -NH2 | i-> i + 7 |
| | | | | | | | | | | | | | | | | | | | x-link #6 |
| Ac- | | Gln | Ser | Gln | Gln | Thr | Phe | Ser | X | Leu | Trp | Arg | Leu | Leu | Pro | X | Asn | -NH2 | i-> i + 7 |
| | | | | | | | | | | | | | | | | | | | x-link #7 |
| Ac- | | Gln | Ser | Gln | Gln | Thr | Phe | Ser | Asn | X | Trp | Arg | Leu | Leu | Pro | Gln | X | -NH2 | i-> i + 7 |
| | | | | | | | | | | | | | | | | | | | x-link #8 |

TABLE 2
(SEQ ID NOS 19-31, respectively, in order of appearance)

| | |
|---|---|
| Sequence (bold = critical residue; X = cross-linked amino acid) | Design Notes |

| | | | | | | | | | | | | | | | | |
|---|---|---|---|---|---|---|---|---|---|---|---|---|---|---|---|---|
| Ac- | | Leu | Trp | Phe | Glu | His | Tyr | Trp | Ala | Gln | Leu | Thr | Ser | | -NH2 | linear |
| Ac- | X | Leu | Trp | Phe | X | His | Tyr | Trp | Ala | Gln | Leu | Thr | Ser | | -NH2 | i-> i + 4 |
| | | | | | | | | | | | | | | | | x-link #1 |
| Ac- | | X | Trp | Phe | Glu | X | Tyr | Trp | Ala | X | Leu | X | Ser | | -NH2 | i-> i + 4 |
| | | | | | | | | | | | | | | | | x-link #2 |
| Ac- | | Leu | X | Phe | Glu | His | X | Trp | Ala | Gln | Leu | Thr | Ser | | -NH2 | i-> i + 4 |
| | | | | | | | | | | | | | | | | x-link #3 |
| Ac- | | Leu | Trp | Phe | Glu | His | Tyr | Trp | X | Gln | Leu | Thr | Ser | | -NH2 | i-> i + 4 |
| | | | | | | | | | | | | | | | | x-link #4 |
| Ac- | | Leu | Trp | Phe | Glu | His | Tyr | Trp | Ala | X | Leu | X | Ser | | -NH2 | i-> i + 4 |
| | | | | | | | | | | | | | | | | x-link #5 |
| Ac- | | Leu | Trp | Phe | Glu | His | Tyr | Trp | X | Gln | Leu | Thr | X | | -NH2 | i-> i + 4 |
| | | | | | | | | | | | | | | | | x-link #6 |
| Ac- | | Leu | Trp | Phe | Glu | His | Tyr | Trp | Ala | X | Leu | Thr | Ser | X | -NH2 | i-> i + 4 |
| | | | | | | | | | | | | | | | | x-link #7 |
| Ac- | | X | Trp | Phe | Glu | His | Tyr | Trp | X | Gln | Leu | Thr | Ser | | -NH2 | i-> i + 7 |
| | | | | | | | | | | | | | | | | x-link #1 |
| Ac- | | Gln | X | Phe | Glu | His | Tyr | Trp | Ala | X | Leu | Thr | Ser | | -NH2 | i-> i + 7 |
| | | | | | | | | | | | | | | | | x-link #2 |
| Ac- | | Gln | Trp | Phe | X | His | Tyr | Trp | Ala | Gln | Leu | X | Ser | | -NH2 | i-> i + 7 |
| | | | | | | | | | | | | | | | | x-link #3 |
| Ac- | | Gln | Trp | Phe | Glu | X | Tyr | Trp | Ala | Gln | Leu | Thr | X | | -NH2 | i-> i + 7 |
| | | | | | | | | | | | | | | | | x-link #4 |
| Ac- | | Gln | Trp | Phe | Glu | His | X | Trp | Ala | Gln | Leu | Thr | Ser | X | -NH2 | i-> i + 7 |
| | | | | | | | | | | | | | | | | x-link #5 |

TABLE 3
(SEQ ID NOS 32-37, respectively, in order of appearance)

| | | | | | | | | | | | | Design |
|---|---|---|---|---|---|---|---|---|---|---|---|---|
| Sequence (bold = critical residue; X = cross-linked amino acid) | | | | | | | | | | | | Notes |
| Ac- | | Phe | Met | Aib/His/ | Tyr | 6-C1trp | Glu | Ac3/Gln/ | Leu | | -NH2 | linear |
| | | | | Asn | | | | Leu | | | | |
| Ac- | X | Phe | Met | Aib/His/ | X | 6-C1trp | Glu | Ac3/Gln/ | Leu | | -NH2 | i-> i + 4 |
| | | | | Asn | | | | Leu | | | | x-link #1 |
| Ac- | | Phe | X | Aib/His/ | Tyr | 6-C1trp | X | Ac3/Gln/ | Leu | | -NH2 | i-> i + 4 |
| | | | | Asn | | | | Leu | | | | x-link #2 |
| Ac- | | Phe | Met | X | Tyr | 6-C1trp | Glu | X | Leu | | -NH2 | i-> i + 4 |
| | | | | | | | | | | | | x-link #3 |
| Ac- | X | Phe | Met | Aib/His/ | Tyr | 6-C1trp | Glu | X | Leu | | -NH2 | i-> i + 7 |
| | | | | Asn | | | | | | | | x-link #1 |
| Ac- | | Phe | X | Aib/His/ | Tyr | 6-C1trp | Glu | Ac3/Gln/ | Leu | X | -NH2 | i-> i + 7 |
| | | | | Asn | | | | Leu | | | | x-link #2 |

In Table 3 and elsewhere, “Aib” represents a 2-aminoisobutyric acid residue, while “Ac3c” represents an aminocyclopropane carboxylic acid residue.

### Peptidomimetic Macrocycles

[0085] In some embodiments, a peptidomimetic macrocycle of the invention has the formula:

[chemical structure]

[0086] wherein:
[0087] each A, C, D, and E is independently a natural or non-natural amino acid;
[0088] B is a natural or non-natural amino acid, amino acid analog,

[chemical structure]

[—NH-L₃-CO—], [—NH-L₃-SO₂—], or [—NH-L₃-];
[0089] terminal D and E independently optionally include a capping group;
[0090] R₁ and R₂ are independently —H, alkyl, alkenyl, alkynyl, arylalkyl, cycloalkyl, cycloalkylalkyl, heteroalkyl, or heterocycloalkyl, unsubstituted or substituted with halo-;
[0091] L is a macrocycle-forming linker of the formula-L₁-L₂-;
[0092] each L and L′ is independently a macrocycle-forming linker of the formula

[chemical structure]

[0093] L₁, L₂ and L₃ are independently alkylene, alkenylene, alkynylene, heteroalkylene, cycloalkylene, heterocycloalkylene, cycloarylene, heterocycloarylene, or [—R₄—K—R₄—]ₙ, each being optionally substituted with R₅;
[0094] R₃ is hydrogen, alkyl, alkenyl, alkynyl, arylalkyl, heteroalkyl, cycloalkyl, heterocycloalkyl, cycloalkylalkyl, cycloaryl, or heterocycloaryl, optionally substituted with R₅;
[0095] each R₄ is alkylene, alkenylene, alkynylene, heteroalkylene, cycloalkylene, heterocycloalkylene, arylene, or heteroarylene;
[0096] each K is O, S, SO, SO₂, CO, CO₂, or CONR₃;
[0097] each R₅ is independently halogen, alkyl, —OR₆, —N(R₆)₂, —SR₆, —SOR₆, —SO₂R₆, —CO₂R₆, a fluorescent moiety, a radioisotope or a therapeutic agent;
[0098] each R₆ is independently —H, alkyl, alkenyl, alkynyl, arylalkyl, cycloalkylalkyl, heterocycloalkyl, a fluorescent moiety, a radioisotope or a therapeutic agent;
[0099] R₇ is —H, alkyl, alkenyl, alkynyl, arylalkyl, cycloalkyl, heteroalkyl, cycloalkylalkyl, heterocycloalkyl, cycloaryl, or heterocycloaryl, optionally substituted with R₅, or part of a cyclic structure with a D residue;
[0100] R₈ is —H, alkyl, alkenyl, alkynyl, arylalkyl, cycloalkyl, heteroalkyl, cycloalkylalkyl, heterocycloalkyl, cycloaryl, or heterocycloaryl, optionally substituted with R₅, or part of a cyclic structure with an E residue;
[0101] v and w are independently integers from 1-1000, for example 1-500, 1-200, 1-100, 1-50, 1-30, 1-20, or 1-10;
[0102] u is an integer from 1-10, for example 1-5, 1-3 or 1-2;
[0103] x, y and z are independently integers from 0-10; for example the sum of x+y+z is 2, 3, or 6;
[0104] and n is an integer from 1-5.

[0105] In some embodiments, a peptidomimetic macrocycle has the formula:

[chemical structure]

[0106] wherein:
[0107] each A, C, D, and E is independently an amino acid;
[0108] B is an amino acid,

[chemical structure]

[—NH-L₄-CO—], [—NH-L₄-SO₂—], or [—NH-L₄-];
[0109] R₁ and R₂ are independently —H, alkyl, alkenyl, alkynyl, arylalkyl, cycloalkyl, cycloalkylalkyl, heteroalkyl, or heterocycloalkyl, unsubstituted or substituted with halo-; or at least one of R₁ and R₂ forms a macrocycle-forming linker L′ connected to the alpha position of one of said D or E amino acids;
[0110] R₃ is hydrogen, alkyl, alkenyl, alkynyl, arylalkyl, heteroalkyl, cycloalkyl, heterocycloalkyl, cycloalkylalkyl, cycloaryl, or heterocycloaryl, optionally substituted with R₅;
[0111] L₁, L₂, L₃ and L₄ are independently alkylene, alkenylene, alkynylene, heteroalkylene, cycloalkylene, heterocycloalkylene, cycloarylene, heterocycloarylene or [—R₄—K—R₄—]ₙ, each being unsubstituted or substituted with R₅;
[0112] each K is O, S, SO, SO₂, CO, CO₂, or CONR₃;
[0113] each R₄ is alkylene, alkenylene, alkynylene, heteroalkylene, cycloalkylene, heterocycloalkylene, arylene, or heteroarylene;
[0114] each R₅ is independently halogen, alkyl, —OR₆, —N(R₆)₂, —SR₆, —SOR₆, —SO₂R₆, —CO₂R₆, a fluorescent moiety, a radioisotope or a therapeutic agent;
[0115] each R₆ is independently —H, alkyl, alkenyl, alkynyl, arylalkyl, cycloalkylalkyl, heterocycloalkyl, a fluorescent moiety, a radioisotope or a therapeutic agent;
[0116] R₇ is —H, alkyl, alkenyl, alkynyl, arylalkyl, cycloalkyl, heteroalkyl, cycloalkylalkyl, heterocycloalkyl, cycloaryl, or heterocycloaryl, optionally substituted with R₅, or part of a cyclic structure with a D residue;
[0117] R₈ is —H, alkyl, alkenyl, alkynyl, arylalkyl, cycloalkyl, heteroalkyl, cycloalkylalkyl, heterocycloalkyl, cycloaryl, or heterocycloaryl, optionally substituted with R₅, or part of a cyclic structure with an E residue;
[0118] v and w are independently integers from 1-1000, for example 1-500, 1-200, 1-100, 1-50, 1-30, 1-20 or 1-10;
[0119] u is an integer from 1-10, for example 1-5, 1-3 or 1-2;
[0120] x, y and z are independently integers from 0-10, for example the sum of x+y+z is 2, 3, or 6;
[0121] and n is an integer from 1-5.

[0122] In some embodiments, v and w are integers from 1-30. In some embodiments, w is an integer from 3-1000, for example 3-500, 3-200, 3-100, 3-50, 3-30, 3-20, or 3-10. In some embodiments, the sum of x+y+z is 3 or 6. In some embodiments, the sum of x+y+z is 3. In other embodiments, the sum of x+y+z is 6.

[0123] In some embodiments, the peptidomimetic macrocycles are claimed with the proviso that when u=1 and w=2, the first C-terminal amino acid represented by E is not an Arginine (R) and/or the second C-terminal amino acid represented by E is not a Threonine (T). For instance, when u=1 and w=2, the first C-terminal amino acid and/or the second C-terminal amino acid represented by E do not comprise a positively charged side chain or a polar uncharged side chain. In some embodiments, when u=1 and w=2, the first C-terminal amino acid and/or the second C-terminal amino acid represented by E comprise a hydrophobic side chain. For example, when w=2, the first C-terminal amino acid and/or the second N-terminal amino acid represented by E comprise a hydrophobic side chain, for example a large hydrophobic side chain.

[0124] In some embodiments, w is between 3 and 1000. For example, the third amino acid represented by E comprises a large hydrophobic side chain.

[0125] In some embodiments any peptidomimetic macrocycle disclosed, L₁ and L₂, either alone or in combination, do not form an all hydrocarbon chain or a thioether. In other embodiments any peptidomimetic macrocycle disclosed, L₁ and L₂, either alone or in combination, do not form an all hydrocarbon chain or a triazole.

[0126] In one example, at least one of R₁ and R₂ is alkyl, unsubstituted or substituted with halo-. In another example, both R₁ and R₂ are independently alkyl, unsubstituted or substituted with halo-. In some embodiments, at least one of R₁ and R₂ is methyl. In other embodiments, R₁ and R₂ are methyl.

[0127] In some embodiments, x+y+z is at least 3. In other embodiments, x+y+z is 1, 2, 3, 4, 5, 6, 7, 8, 9 or 10. In some embodiments, the sum of x+y+z is 3 or 6. In some embodiments, the sum of x+y+z is 3. In other embodiments, the sum of x+y+z is 6. Each occurrence of A, B, C, D or E in a macrocycle or macrocycle precursor is independently selected. For example, a sequence represented by the formula [A]ₓ, when x is 3, encompasses embodiments where the amino acids are not identical, e.g. Gln-Asp-Ala as well as embodiments where the amino acids are identical, e.g. Gln-Gln-Gln. This applies for any value of x, y, or z in the indicated ranges. Similarly, when u is greater than 1, each compound can encompass peptidomimetic macrocycles which are the same or different. For example, a compound can comprise peptidomimetic macrocycles comprising different linker lengths or chemical compositions.

[0128] In some embodiments, the peptidomimetic macrocycle comprises a secondary structure which is an α-helix and R₈ is —H, allowing intrahelical hydrogen bonding. In some embodiments, at least one of A, B, C, D or E is an α,α-disubstituted amino acid. In one example, B is an α,α-disubstituted amino acid. For instance, at least one of A, B, C, D or E is 2-aminoisobutyric acid. In other embodiments, at least one of A, B, C, D or E is

[chemical structure]

[0129] In other embodiments, the length of the macrocycle-forming linker L as measured from a first Cα to a second Cα is selected to stabilize a desired secondary peptide structure, such as an α-helix formed by residues of the peptidomimetic macrocycle including, but not necessarily limited to, those between the first Cα to a second Cα.

[0130] Peptidomimetic macrocycles are also provided of the formula:

[chemical structure]

[0131] wherein:
[0132] each of Xaa₃, Xaa₅, Xaa₆, Xaa₇, Xaa₈, Xaa₉, and Xaa₁₀ is individually an amino acid, wherein at least three of Xaa₃, Xaa₅, Xaa₆, Xaa₇, Xaa₈, Xaa₉, and Xaa₁₀ are the same amino acid as the amino acid at the corresponding position of the sequence Phe₃-X₄-His₅-Tyr₆-Trp₇-Ala₈-Gln₉-Leu₁₀-X₁₁-Ser₁₂ (SEQ ID NO: 39), where each X is an amino acid;
[0133] each D and E is independently an amino acid;
[0134] R₁ and R₂ are independently —H, alkyl, alkenyl, alkynyl, arylalkyl, cycloalkyl, cycloalkylalkyl, heteroalkyl, or heterocycloalkyl, unsubstituted or substituted with halo-; or at least one of R₁ and R₂ forms a macrocycle-forming linker L′ connected to the alpha position of one of said D or E amino acids;
[0135] each L or L′ is independently a macrocycle-forming linker of the formula -L₁-L₂-;
[0136] L₁ and L₂ are independently alkylene, alkenylene, alkynylene, heteroalkylene, cycloalkylene, heterocycloalkylene, cycloarylene, heterocycloarylene, or [—R₄—K—R₄—]ₙ, each being optionally substituted with R₅;
[0137] R₃ is hydrogen, alkyl, alkenyl, alkynyl, arylalkyl, heteroalkyl, cycloalkyl, heterocycloalkyl, cycloalkylalkyl, cycloaryl, or heterocycloaryl, optionally substituted with R₅;
[0138] each R₄ is alkylene, alkenylene, alkynylene, heteroalkylene, cycloalkylene, heterocycloalkylene, arylene, or heteroarylene;
[0139] each K is O, S, SO, SO₂, CO, CO₂, or CONR₃;
[0140] each R₅ is independently halogen, alkyl, —OR₆, —N(R₆)₂, —SR₆, —SOR₆, —SO₂R₆, —CO₂R₆, a fluorescent moiety, a radioisotope or a therapeutic agent;
[0141] each R₆ is independently —H, alkyl, alkenyl, alkynyl, arylalkyl, cycloalkylalkyl, heterocycloalkyl, a fluorescent moiety, a radioisotope or a therapeutic agent;
[0142] R₇ is —H, alkyl, alkenyl, alkynyl, arylalkyl, cycloalkyl, heteroalkyl, cycloalkylalkyl, heterocycloalkyl, cycloaryl, or heterocycloaryl, optionally substituted with R₅, or part of a cyclic structure with a D residue;
[0143] R₈ is —H, alkyl, alkenyl, alkynyl, arylalkyl, cycloalkyl, heteroalkyl, cycloalkylalkyl, heterocycloalkyl, cycloaryl, or heterocycloaryl, optionally substituted with R₅, or part of a cyclic structure with an E residue;
[0144] v is an integer from 1-1000, for example 1-500, 1-200, 1-100, 1-50, 1-30, 1-20 or 1-10;
[0145] w is an integer from 3-1000, for example 3-500, 3-200, 3-100, 3-50, 3-30, 3-20, or 3-10; and
[0146] n is an integer from 1-5.

[0147] In some embodiments, v and w are integers from 1-30. In some embodiments, w is an integer from 3-1000, for example 3-500, 3-200, 3-100, 3-50, 3-30, 3-20, or 3-10. In some embodiments, the sum of x+y+z is 3 or 6. In some embodiments, the sum of x+y+z is 3. In other embodiments, the sum of x+y+z is 6.

[0148] In some embodiments of any of the Formulas described herein, at least three of Xaa₃, Xaa₅, Xaa₆, Xaa₇, Xaa₈, Xaa₉, and Xaa₁₀ are the same amino acid as the amino acid at the corresponding position of the sequence Phe₃-X₄-His₅-Tyr₆-Trp₇-Ala₈-Gln₉-Leu₁₀-X₁₁-Ser₁₂ (SEQ ID NO: 39). In other embodiments, at least four of Xaa₃, Xaa₅, Xaa₆, Xaa₇, Xaa₈, Xaa₉, and Xaa₁₀ are the same amino acid as the amino acid at the corresponding position of the sequence Phe₃-X₄-His₅-Tyr₆-Trp₇-Ala₈-Gln₉-Leu₁₀-X₁₁-Ser₁₂ (SEQ ID NO: 39). In other embodiments, at least five of Xaa₃, Xaa₅, Xaa₆, Xaa₇, Xaa₈, Xaa₉, and Xaa₁₀ are the same amino acid as the amino acid at the corresponding position of the sequence Phe₃-X₄-His₅-Tyr₆-Trp₇-Ala₈-Gln₉-Leu₁₀-X₁₁-Ser₁₂ (SEQ ID NO: 39). In other embodiments, at least six of Xaa₃, Xaa₅, Xaa₆, Xaa₇, Xaa₈, Xaa₉, and Xaa₁₀ are the same amino acid as the amino acid at the corresponding position of the sequence Phe₃-X₄-His₅-Tyr₆-Trp₇-Ala₈-Gln₉-Leu₁₀-X₁₁-Ser₁₂ (SEQ ID NO: 39). In other embodiments, at least seven of Xaa₃, Xaa₅, Xaa₆, Xaa₇, Xaa₈, Xaa₉, and Xaa₁₀ are the same amino acid as the amino acid at the corresponding position of the sequence Phe₃-X₄-His₅-Tyr₆-Trp₇-Ala₈-Gln₉-Leu₁₀-X₁₁-Ser₁₂ (SEQ ID NO: 39).

[0149] In some embodiments, a peptidomimetic macrocycle has the Formula:

[chemical structure]

[0150] wherein:
[0151] each of Xaa₃, Xaa₅, Xaa₆, Xaa₇, Xaa₈, Xaa₉, and Xaa₁₀ is individually an amino acid, wherein at least three of Xaa₃, Xaa₅, Xaa₆, Xaa₇, Xaa₈, Xaa₉, and Xaa₁₀ are the same amino acid as the amino acid at the corresponding position of the sequence Phe₃-X₄-Glu₅-Tyr₆-Trp₇-Ala₈-Gln₉-Leu₁₀/Cba₁₀-X₁₁-Ala₁₂(SEQ ID NO: 41), where each X is an amino acid;
[0152] each D is independently an amino acid;
[0153] each E is independently an amino acid, for example an amino acid selected from Ala (alanine), D-Ala (D-alanine), Aib (α-aminoisobutyric acid), Sar (N-methyl glycine), and Ser (serine);
[0154] R₁ and R₂ are independently —H, alkyl, alkenyl, alkynyl, arylalkyl, cycloalkyl, cycloalkylalkyl, heteroalkyl, or heterocycloalkyl, unsubstituted or substituted with halo-; or at least one of R₁ and R₂ forms a macrocycle-forming linker L′ connected to the alpha position of one of said D or E amino acids;
[0155] each L or L′ is independently a macrocycle-forming linker of the formula -L₁-L₂-;
[0156] each L and L′ is independently a macrocycle-forming linker of the formula

[chemical structure]

[0157] L₁ and L₂ are independently alkylene, alkenylene, alkynylene, heteroalkylene, cycloalkylene, heterocycloalkylene, cycloarylene, heterocycloarylene, or [—R₄—K—R₄—]ₙ, each being optionally substituted with R₅;
[0158] R₃ is hydrogen, alkyl, alkenyl, alkynyl, arylalkyl, heteroalkyl, cycloalkyl, heterocycloalkyl, cycloalkylalkyl, cycloaryl, or heterocycloaryl, optionally substituted with R₅;
[0159] each R₄ is alkylene, alkenylene, alkynylene, heteroalkylene, cycloalkylene, heterocycloalkylene, arylene, or heteroarylene;
[0160] each K is O, S, SO, SO₂, CO, CO₂, or CONR₃;
[0161] each R₅ is independently halogen, alkyl, —OR₆, —N(R₆)₂, —SR₆, —SOR₆, —SO₂R₆, —CO₂R₆, a fluorescent moiety, a radioisotope or a therapeutic agent;
[0162] each R₆ is independently —H, alkyl, alkenyl, alkynyl, arylalkyl, cycloalkylalkyl, heterocycloalkyl, a fluorescent moiety, a radioisotope or a therapeutic agent;
[0163] R₇ is —H, alkyl, alkenyl, alkynyl, arylalkyl, cycloalkyl, heteroalkyl, cycloalkylalkyl, heterocycloalkyl, cycloaryl, or heterocycloaryl, optionally substituted with R₅, or part of a cyclic structure with a D residue;
[0164] R₈ is —H, alkyl, alkenyl, alkynyl, arylalkyl, cycloalkyl, heteroalkyl, cycloalkylalkyl, heterocycloalkyl, cycloaryl, or heterocycloaryl, optionally substituted with R₅, or part of a cyclic structure with an E residue;
[0165] v is an integer from 1-1000, for example 1-500, 1-200, 1-100, 1-50, 1-30, 1-20, or 1-10;
[0166] w is an integer from 3-1000, for example 3-500, 3-200, 3-100, 3-50, 3-30, 3-20, or 3-10; and
[0167] n is an integer from 1-5.

[0168] In some embodiments of the above Formula, at least three of Xaa₃, Xaa₅, Xaa₆, Xaa₇, Xaa₈, Xaa₉, and Xaa₁₀ are the same amino acid as the amino acid at the corresponding position of the sequence Phe₃-X₄-Glu₅-Tyr₆-Trp₇-Ala₈-Gln₉-Leu₁₀/Cba₁₀-X₁₁-Ala₁₂ (SEQ ID NO: 41). In other embodiments of the above Formula, at least four of Xaa₃, Xaa₅, Xaa₆, Xaa₇, Xaa₈, Xaa₉, and Xaa₁₀ are the same amino acid as the amino acid at the corresponding position of the sequence Phe₃-X₄-Glu₅-Tyr₆-Trp₇-Ala₈-Gln₉-Leu₁₀/Cba₁₀-X₁₁-Ala₁₂ (SEQ ID NO: 41) In other embodiments of the above Formula, at least five of Xaa₃, Xaa₅, Xaa₆, Xaa₇, Xaa₈, Xaa₉, and Xaa₁₀ are the same amino acid as the amino acid at the corresponding position of the sequence Phe₃-X₄-Glu₅-Tyr₆-Trp₇-Ala₈-Gln₉-Leu₁₀/Cba₁₀-X₁₁-Ala₁₂ (SEQ ID NO: 41). In other embodiments of the above Formula, at least six of Xaa₃, Xaa₅, Xaa₆, Xaa₇, Xaa₈, Xaa₉, and Xaa₁₀ are the same amino acid as the amino acid at the corresponding position of the sequence Phe₃-X₄-Glu₅-Tyr₆-Trp₇-Ala₈-Gln₉-Leu₁₀/Cba₁₀-X₁₁-Ala₁₂ (SEQ ID NO: 41) In other embodiments of the above Formula, at least seven of Xaa₃, Xaa₅, Xaa₆, Xaa₇, Xaa₈, Xaa₉, and Xaa₁₀ are the same amino acid as the amino acid at the corresponding position of the sequence Phe₃-X₄-Glu₅-Tyr₆-Trp₇-Ala₈-Gln₉-Leu₁₀/Cba₁₀-X₁₁-Ala₁₂ (SEQ ID NO: 41).

[0169] In some embodiments, w is an integer from 3-10, for example 3-6, 3-8, 6-8, or 6-10. In some embodiments, w is 3. In other embodiments, w is 6. In some embodiments, v is an integer from 1-10, for example 2-5. In some embodiments, v is 2.

[0170] In one embodiment of any of the Formulas described herein, L₁ and L₂, either alone or in combination, do not form a triazole or a thioether.

[0171] In one example, at least one of R₁ and R₂ is alkyl, unsubstituted or substituted with halo-. In another example, both R₁ and R₂ are independently alkyl, unsubstituted or substituted with halo-. In some embodiments, at least one of R₁ and R₂ is methyl. In other embodiments, R₁ and R₂ are methyl.

[0172] In some embodiments of the invention, x+y+z is at least 3. In other embodiments of the invention, x+y+z is 1, 2, 3, 4, 5, 6, 7, 8, 9 or 10. Each occurrence of A, B, C, D or E in a macrocycle or macrocycle precursor of the invention is independently selected. For example, a sequence represented by the formula [A]ₓ, when x is 3, encompasses embodiments where the amino acids are not identical, e.g. Gln-Asp-Ala as well as embodiments where the amino acids are identical, e.g. Gln-Gln-Gln. This applies for any value of x, y, or z in the indicated ranges. Similarly, when u is greater than 1, each compound of the invention may encompass peptidomimetic macrocycles which are the same or different. For example, a compound of the invention may comprise peptidomimetic macrocycles comprising different linker lengths or chemical compositions.

[0173] In some embodiments, the peptidomimetic macrocycle of the invention comprises a secondary structure which is an α-helix and R₈ is —H, allowing intrahelical hydrogen bonding. In some embodiments, at least one of A, B, C, D or E is an α,α-disubstituted amino acid. In one example, B is an α,α-disubstituted amino acid. For instance, at least one of A, B, C, D or E is 2-aminoisobutyric acid. In other embodiments, at least one of A, B, C, D or E is

[chemical structure]

[0174] In other embodiments, the length of the macrocycle-forming linker L as measured from a first Cα to a second Cα is selected to stabilize a desired secondary peptide structure, such as an α-helix formed by residues of the peptidomimetic macrocycle including, but not necessarily limited to, those between the first Cα to a second Cα.

[0175] In one embodiment, the peptidomimetic macrocycle is:

[chemical structure]

[0176] wherein each R₁ and R₂ is independently —H, alkyl, alkenyl, alkynyl, arylalkyl, cycloalkyl, cycloalkylalkyl, heteroalkyl, or heterocycloalkyl, unsubstituted or substituted with halo-.

[0177] In related embodiments, the peptidomimetic macrocycle is:

[chemical structure]

[0178] Peptidomimetic macrocycles are also provided of the formula:

[chemical structure]

[0179] wherein:
[0180] each of Xaa₃, Xaa₅, Xaa₆, Xaa₇, Xaa₈, Xaa₉, and Xaa₁₀ is individually an amino acid, wherein at least three of Xaa₃, Xaa₅, Xaa₆, Xaa₇, Xaa₈, Xaa₉, and Xaa₁₀ are the same amino acid as the amino acid at the corresponding position of the sequence Phe₃-X₄-His₅-Tyr₆-Trp₇-Ala₈-Gln₉-Leu₁₀-X₁₁-Ser₁₂ (SEQ ID NO: 39), where each X is an amino acid;
[0181] each D and E is independently an amino acid;
[0182] R₁ and R₂ are independently —H, alkyl, alkenyl, alkynyl, arylalkyl, cycloalkyl, cycloalkylalkyl, heteroalkyl, or heterocycloalkyl, unsubstituted or substituted with halo-; or at least one of R₁ and R₂ forms a macrocycle-forming linker L′ connected to the alpha position of one of said D or E amino acids;
[0183] L₁, L₂, L₃ and L₄ are independently alkylene, alkenylene, alkynylene, heteroalkylene, cycloalkylene, heterocycloalkylene, cycloarylene, heterocycloarylene or [—R₄—K—R₄—]ₙ, each being unsubstituted or substituted with R₅;
[0184] each K is O, S, SO, SO₂, CO, CO₂, or CONR₃;
[0185] R₃ is hydrogen, alkyl, alkenyl, alkynyl, arylalkyl, heteroalkyl, cycloalkyl, heterocycloalkyl, cycloalkylalkyl, cycloaryl, or heterocycloaryl, optionally substituted with R₅;
[0186] each R₄ is alkylene, alkenylene, alkynylene, heteroalkylene, cycloalkylene, heterocycloalkylene, arylene, or heteroarylene;
[0187] each R₅ is independently halogen, alkyl, —OR₆, —N(R₆)₂, —SR₆, —SOR₆, —SO₂R₆, —CO₂R₆, a fluorescent moiety, a radioisotope or a therapeutic agent;
[0188] each R₆ is independently —H, alkyl, alkenyl, alkynyl, arylalkyl, cycloalkylalkyl, heterocycloalkyl, a fluorescent moiety, a radioisotope or a therapeutic agent;
[0189] R₇ is —H, alkyl, alkenyl, alkynyl, arylalkyl, cycloalkyl, heteroalkyl, cycloalkylalkyl, heterocycloalkyl, cycloaryl, or heterocycloaryl, optionally substituted with R₅, or part of a cyclic structure with a D residue;
[0190] R₈ is —H, alkyl, alkenyl, alkynyl, arylalkyl, cycloalkyl, heteroalkyl, cycloalkylalkyl, heterocycloalkyl, cycloaryl, or heterocycloaryl, optionally substituted with R₅, or part of a cyclic structure with an E residue;
[0191] v is an integer from 1-1000, for example 1-500, 1-200, 1-100, 1-50, 1-30, 1-20 or 1-10;
[0192] w is an integer from 3-1000, for example 3-500, 3-200, 3-100, 3-50, 3-30, 3-20, or 3-10; and
[0193] n is an integer from 1-5.

[0194] Peptidomimetic macrocycles are also provided of the formula:

[chemical structure]

[0195] wherein:
[0196] each of Xaa₃, Xaa₅, Xaa₆, Xaa₇, Xaa₈, Xaa₉, and Xaa₁₀ is individually an amino acid, wherein at least three of Xaa₃, Xaa₅, Xaa₆, Xaa₇, Xaa₈, Xaa₉, and Xaa₁₀ are the same amino acid as the amino acid at the corresponding position of the sequence Phe₃-X₄-Glu₅-Tyr₆-Trp₇-Ala₈-Gln₉-Leu₁₀/Cba₁₀-X₁₁-Ala₁₂ (SEQ ID NO: 41), where each X is an amino acid;
[0197] each D and E is independently an amino acid;
[0198] R₁ and R₂ are independently —H, alkyl, alkenyl, alkynyl, arylalkyl, cycloalkyl, cycloalkylalkyl, heteroalkyl, or heterocycloalkyl, unsubstituted or substituted with halo-; or at least one of R₁ and R₂ forms a macrocycle-forming linker L′ connected to the alpha position of one of said D or E amino acids;
[0199] L₁, L₂, L₃ and L₄ are independently alkylene, alkenylene, alkynylene, heteroalkylene, cycloalkylene, heterocycloalkylene, cycloarylene, heterocycloarylene or [—R₄—K—R₄—]ₙ, each being unsubstituted or substituted with R₅;
[0200] each K is O, S, SO, SO₂, CO, CO₂, or CONR₃;
[0201] R₃ is hydrogen, alkyl, alkenyl, alkynyl, arylalkyl, heteroalkyl, cycloalkyl, heterocycloalkyl, cycloalkylalkyl, cycloaryl, or heterocycloaryl, optionally substituted with R₅;
[0202] each R₄ is alkylene, alkenylene, alkynylene, heteroalkylene, cycloalkylene, heterocycloalkylene, arylene, or heteroarylene;
[0203] each R₅ is independently halogen, alkyl, —OR₆, —N(R₆)₂, —SR₆, —SOR₆, —SO₂R₆, —CO₂R₆, a fluorescent moiety, a radioisotope or a therapeutic agent;
[0204] each R₆ is independently —H, alkyl, alkenyl, alkynyl, arylalkyl, cycloalkylalkyl, heterocycloalkyl, a fluorescent moiety, a radioisotope or a therapeutic agent;
[0205] R₇ is —H, alkyl, alkenyl, alkynyl, arylalkyl, cycloalkyl, heteroalkyl, cycloalkylalkyl, heterocycloalkyl, cycloaryl, or heterocycloaryl, optionally substituted with R₅, or part of a cyclic structure with a D residue;
[0206] R₈ is —H, alkyl, alkenyl, alkynyl, arylalkyl, cycloalkyl, heteroalkyl, cycloalkylalkyl, heterocycloalkyl, cycloaryl, or heterocycloaryl, optionally substituted with R₅, or part of a cyclic structure with an E residue;
[0207] v is an integer from 1-1000, for example 1-500, 1-200, 1-100, 1-50, 1-30, 1-20, or 1-10;
[0208] w is an integer from 3-1000, for example 3-500, 3-200, 3-100, 3-50, 3-30, 3-20, or 3-10; and
[0209] n is an integer from 1-5.

[0210] In one embodiment, the peptidomimetic macrocycle is:

[chemical structure]

[0211] wherein each R₁ and R₂ is independently independently —H, alkyl, alkenyl, alkynyl, arylalkyl, cycloalkyl, cycloalkylalkyl, heteroalkyl, or heterocycloalkyl, unsubstituted or substituted with halo-.

[0212] In related embodiments, the peptidomimetic macrocycle is:

[chemical structure]

[0213] wherein each R₁′ and R₂′ is independently an amino acid.

[0214] In other embodiments, the peptidomimetic macrocycle is a compound of any of the formulas shown below:

[chemical structure]

[chemical structure]

[chemical structure]

[0215] wherein “AA” represents any natural or non-natural amino acid side chain and “ [symbol] ” is [D]ᵥ, [E]_{w} as defined above, and n is an integer between 0 and 20, 50, 100, 200, 300, 400 or 500. In some embodiments, n is 0. In other embodiments, n is less than 50.

[0216] Exemplary embodiments of the macrocycle-forming linker L are shown below.

[chemical structure]

[chemical structure]

[chemical structure]

[chemical structure]

[chemical structure]

[chemical structure]

[chemical structure]

[chemical structure]

[chemical structure]

[chemical structure]

[chemical structure]

[chemical structure]

[chemical structure]

[0217] In other embodiments, D and/or E in the compound are further modified in order to facilitate cellular uptake. In some embodiments, lipidating or PEGylating a peptidomimetic macrocycle facilitates cellular uptake, increases bioavailability, increases blood circulation, alters pharmacokinetics, decreases immunogenicity and/or decreases the needed frequency of administration.

[0218] In other embodiments, at least one of [D] and [E] in the compound of formulas disclosed represents a moiety comprising an additional macrocycle-forming linker such that the peptidomimetic macrocycle comprises at least two macrocycle-forming linkers. In a specific embodiment, a peptidomimetic macrocycle comprises two macrocycle-forming linkers. In an embodiment, u is 2.

[0219] In the peptidomimetic macrocycles of the invention, any of the macrocycle-forming linkers described herein may be used in any combination with any of the sequences shown in Tables 1-3, 9-13, 23-25, 27-28 and also with any of the R— substituents indicated herein.

[0220] In some embodiments, the peptidomimetic macrocycle comprises at least one α-helix motif. For example, A, B and/or C in the compounds disclosed include one or more α-helices. As a general matter, α-helices include between 3 and 4 amino acid residues per turn. In some embodiments, the α-helix of the peptidomimetic macrocycle includes 1 to 5 turns and, therefore, 3 to 20 amino acid residues. In specific embodiments, the α-helix includes 1 turn, 2 turns, 3 turns, 4 turns, or 5 turns. In some embodiments, the macrocycle-forming linker stabilizes an α-helix motif included within the peptidomimetic macrocycle. Thus, in some embodiments, the length of the macrocycle-forming linker L from a first Cα to a second Cα is selected to increase the stability of an α-helix. In some embodiments, the macrocycle-forming linker spans from 1 turn to 5 turns of the α-helix. In some embodiments, the macrocycle-forming linker spans approximately 1 turn, 2 turns, 3 turns, 4 turns, or 5 turns of the α-helix. In some embodiments, the length of the macrocycle-forming linker is approximately 5 Å to 9 Å per turn of the α-helix, or approximately 6 Å to 8 Å per turn of the α-helix. Where the macrocycle-forming linker spans approximately 1 turn of an α-helix, the length is equal to approximately 5 carbon-carbon bonds to 13 carbon-carbon bonds, approximately 7 carbon-carbon bonds to 11 carbon-carbon bonds, or approximately 9 carbon-carbon bonds. Where the macrocycle-forming linker spans approximately 2 turns of an α-helix, the length is equal to approximately 8 carbon-carbon bonds to 16 carbon-carbon bonds, approximately 10 carbon-carbon bonds to 14 carbon-carbon bonds, or approximately 12 carbon-carbon bonds. Where the macrocycle-forming linker spans approximately 3 turns of an α-helix, the length is equal to approximately 14 carbon-carbon bonds to 22 carbon-carbon bonds, approximately 16 carbon-carbon bonds to 20 carbon-carbon bonds, or approximately 18 carbon-carbon bonds. Where the macrocycle-forming linker spans approximately 4 turns of an α-helix, the length is equal to approximately 20 carbon-carbon bonds to 28 carbon-carbon bonds, approximately 22 carbon-carbon bonds to 26 carbon-carbon bonds, or approximately 24 carbon-carbon bonds. Where the macrocycle-forming linker spans approximately 5 turns of an α-helix, the length is equal to approximately 26 carbon-carbon bonds to 34 carbon-carbon bonds, approximately 28 carbon-carbon bonds to 32 carbon-carbon bonds, or approximately 30 carbon-carbon bonds. Where the macrocycle-forming linker spans approximately 1 turn of an α-helix, the linkage contains approximately 4 atoms to 12 atoms, approximately 6 atoms to 10 atoms, or approximately 8 atoms. Where the macrocycle-forming linker spans approximately 2 turns of the α-helix, the linkage contains approximately 7 atoms to 15 atoms, approximately 9 atoms to 13 atoms, or approximately 11 atoms. Where the macrocycle-forming linker spans approximately 3 turns of the α-helix, the linkage contains approximately 13 atoms to 21 atoms, approximately 15 atoms to 19 atoms, or approximately 17 atoms. Where the macrocycle-forming linker spans approximately 4 turns of the α-helix, the linkage contains approximately 19 atoms to 27 atoms, approximately 21 atoms to 25 atoms, or approximately 23 atoms. Where the macrocycle-forming linker spans approximately 5 turns of the α-helix, the linkage contains approximately 25 atoms to 33 atoms, approximately 27 atoms to 31 atoms, or approximately 29 atoms. Where the macrocycle-forming linker spans approximately 1 turn of the α-helix, the resulting macrocycle forms a ring containing approximately 17 members to 25 members, approximately 19 members to 23 members, or approximately 21 members. Where the macrocycle-forming linker spans approximately 2 turns of the α-helix, the resulting macrocycle forms a ring containing approximately 29 members to 37 members, approximately 31 members to 35 members, or approximately 33 members. Where the macrocycle-forming linker spans approximately 3 turns of the α-helix, the resulting macrocycle forms a ring containing approximately 44 members to 52 members, approximately 46 members to 50 members, or approximately 48 members. Where the macrocycle-forming linker spans approximately 4 turns of the α-helix, the resulting macrocycle forms a ring containing approximately 59 members to 67 members, approximately 61 members to 65 members, or approximately 63 members. Where the macrocycle-forming linker spans approximately 5 turns of the α-helix, the resulting macrocycle forms a ring containing approximately 74 members to 82 members, approximately 76 members to 80 members, or approximately 78 members.

[0221] In other embodiments, the invention provides peptidomimetic macrocycles:

[chemical structure]

[0222] wherein:
[0223] each A, C, D, and E is independently a natural or non-natural amino acid, and the terminal D and E independently optionally include a capping group;
[0224] B is a natural or non-natural amino acid, amino acid analog,

[chemical structure]

[—NH-L₃-CO—], [—NH-L₃-SO₂—], or [—NH-L₃-];
[0225] R₁ and R₂ are independently —H, alkyl, alkenyl, alkynyl, arylalkyl, cycloalkyl, cycloalkylalkyl, heteroalkyl, or heterocycloalkyl, unsubstituted or substituted with halo-, or part of a cyclic structure with an E residue;
[0226] R₃ is hydrogen, alkyl, alkenyl, alkynyl, arylalkyl, heteroalkyl, cycloalkyl, heterocycloalkyl, cycloalkylalkyl, cycloaryl, or heterocycloaryl, optionally substituted with R₅;
[0227] L is a macrocycle-forming linker of the formula -L₁-L₂-;
[0228] L₁ and L₂ are independently alkylene, alkenylene, alkynylene, heteroalkylene, cycloalkylene, heterocycloalkylene, cycloarylene, heterocycloarylene, or [—R₄—K—R₄—]ₙ, each being optionally substituted with R₅;
[0229] each R₄ is alkylene, alkenylene, alkynylene, heteroalkylene, cycloalkylene, heterocycloalkylene, arylene, or heteroarylene;
[0230] each K is O, S, SO, SO₂, CO, CO₂, or CONR₃;
[0231] each R₅ is independently halogen, alkyl, —OR₆, —N(R₆)₂, —SR₆, —SOR₆, —SO₂R₆, —CO₂R₆, a fluorescent moiety, a radioisotope or a therapeutic agent;
[0232] each R₆ is independently —H, alkyl, alkenyl, alkynyl, arylalkyl, cycloalkylalkyl, heterocycloalkyl, a fluorescent moiety, a radioisotope or a therapeutic agent;
[0233] R₇ is —H, alkyl, alkenyl, alkynyl, arylalkyl, cycloalkyl, heteroalkyl, cycloalkylalkyl, heterocycloalkyl, cycloaryl, or heterocycloaryl, optionally substituted with R₅;
[0234] v and w are independently integers from 1-1000;
[0235] u is an integer from 1-10;
[0236] x, y and z are independently integers from 0-10; and
[0237] n is an integer from 1-5.

[0238] In one example, L₁ and L₂, either alone or in combination, do not form a triazole or a thioether.

[0239] In one example, at least one of R₁ and R₂ is alkyl, unsubstituted or substituted with halo-. In another example, both R₁ and R₂ are independently alkyl, unsubstituted or substituted with halo-. In some embodiments, at least one of R₁ and R₂ is methyl. In other embodiments, R₁ and R₂ are methyl.

[0240] In some embodiments of the invention, x+y+z is at least 1. In other embodiments of the invention, x+y+z is at least 2. In other embodiments of the invention, x+y+z is 1, 2, 3, 4, 5, 6, 7, 8, 9 or 10. Each occurrence of A, B, C, D or E in a macrocycle or macrocycle precursor of the invention is independently selected. For example, a sequence represented by the formula [A]ₓ, when x is 3, encompasses embodiments where the amino acids are not identical, e.g. Gln-Asp-Ala as well as embodiments where the amino acids are identical, e.g. Gln-Gln-Gln. This applies for any value of x, y, or z in the indicated ranges.

[0241] In some embodiments, the peptidomimetic macrocycle of the invention comprises a secondary structure which is an α-helix and R₈ is —H, allowing intrahelical hydrogen bonding. In some embodiments, at least one of A, B, C, D or E is an α,α-disubstituted amino acid. In one example, B is an α,α-disubstituted amino acid. For instance, at least one of A, B, C, D or E is 2-aminoisobutyric acid. In other embodiments, at least one of A, B, C, D or E is

[chemical structure]

[0242] In other embodiments, the length of the macrocycle-forming linker L as measured from a first Cα to a second Cα is selected to stabilize a desired secondary peptide structure, such as an α-helix formed by residues of the peptidomimetic macrocycle including, but not necessarily limited to, those between the first Cα to a second Cα.

[0243] In some embodiments, the peptidomimetic macrocycle has improved binding affinity to MDM2 or MDMX relative to a corresponding peptidomimetic macrocycle where w is 0, 1 or 2. In other instances, the peptidomimetic macrocycle has a reduced ratio of binding affinities to MDMX versus MDM2 relative to a corresponding peptidomimetic macrocycle where w is 0, 1 or 2. In still other instances, the peptidomimetic macrocycle has improved in vitro anti-tumor efficacy against p53 positive tumor cell lines relative to a corresponding peptidomimetic macrocycle where w is 0, 1 or 2. In some embodiments, the peptidomimetic macrocycle shows improved in vitro induction of apoptosis in p53 positive tumor cell lines relative to a corresponding peptidomimetic macrocycle where w is 0, 1 or 2. In other instances, the peptidomimetic macrocycle of claim 1, wherein the peptidomimetic macrocycle has an improved in vitro anti-tumor efficacy ratio for p53 positive versus p53 negative or mutant tumor cell lines relative to a corresponding peptidomimetic macrocycle where w is 0, 1 or 2. In still other instances, the peptidomimetic macrocycle has improved in vivo anti-tumor efficacy against p53 positive tumors relative to a corresponding peptidomimetic macrocycle where w is 0, 1 or 2. In yet other instances, the peptidomimetic macrocycle has improved in vivo induction of apoptosis in p53 positive tumors relative to a corresponding peptidomimetic macrocycle where w is 0, 1 or 2. In some embodiments, the peptidomimetic macrocycle has improved cell permeability relative to a corresponding peptidomimetic macrocycle where w is 0, 1 or 2. In other cases, the peptidomimetic macrocycle has improved solubility relative to a corresponding peptidomimetic macrocycle where w is 0, 1 or 2.

[0244] In some embodiments, Xaa₅ is Glu or an amino acid analog thereof. In some embodiments, Xaa₅ is Glu or an amino acid analog thereof and wherein the peptidomimetic macrocycle has an improved property, such as improved binding affinity, improved solubility, improved cellular efficacy, improved cell permeability, improved in vivo or in vitro anti-tumor efficacy, or improved induction of apoptosis relative to a corresponding peptidomimetic macrocycle where Xaa₅ is Ala.

[0245] In some embodiments, the peptidomimetic macrocycle has improved binding affinity to MDM2 or MDMX relative to a corresponding peptidomimetic macrocycle where Xaa₅ is Ala. In other embodiments, the peptidomimetic macrocycle has a reduced ratio of binding affinities to MDMX vs MDM2 relative to a corresponding peptidomimetic macrocycle where Xaa₅ is Ala. In some embodiments, the peptidomimetic macrocycle has improved solubility relative to a corresponding peptidomimetic macrocycle where Xaa₅ is Ala, or the peptidomimetic macrocycle has improved cellular efficacy relative to a corresponding peptidomimetic macrocycle where Xaa₅ is Ala.

[0246] In some embodiments, Xaa₅ is Glu or an amino acid analog thereof and wherein the peptidomimetic macrocycle has improved biological activity, such as improved binding affinity, improved solubility, improved cellular efficacy, improved helicity, improved cell permeability, improved in vivo or in vitro anti-tumor efficacy, or improved induction of apoptosis relative to a corresponding peptidomimetic macrocycle where Xaa₅ is Ala.

[0247] In one embodiment, a compound disclosed herein can contain unnatural proportions of atomic isotopes at one or more of atoms that constitute such compounds. For example, the compounds can be radiolabeled with radioactive isotopes, such as for example tritium (³H), iodine-125 (¹²⁵I) or carbon-14 (¹⁴C). In another embodiment, a compound disclosed herein can have one or more carbon atoms replaced with a silicon atom. All isotopic variations of the compounds disclosed herein, whether radioactive or not, are contemplated herein.

[0248] The term “liquid cancer” as used herein refers to cancer cells that are present in body fluids, such as blood, lymph, and bone marrow. Liquid cancers include leukemia, myeloma and liquid lymphomas. Liquid lymphomas include lymphomas that contain cysts or liquid areas. Liquid cancers as used herein do not include solid tumors, such as sarcomas and carcinomas or solid lymphomas that do not contain cysts or liquid areas.

[0249] The term “adverse event” (AE) as used herein includes any noxious, pathological, or unintended change in anatomical, physiological, or metabolic functions as indicated by physical signs, symptoms, and/or laboratory changes occurring in any phase of the clinical study whether or not temporally associated with the administration of study medication and whether or not considered related to the study medication. This definition includes an exacerbation of pre-existing medical conditions or events, intercurrent illnesses, hypersensitivity reactions, drug interactions, or clinically significant laboratory findings. An AE does not include the following: (i) medical or surgical procedures, e.g., tooth extraction, transfusion, surgery (The medical condition that leads to the procedure is to be recorded as an AE); (ii) pre-existing conditions or procedures present or detected at the start of the study that do not worsen; (iii) hospitalization for elective surgeries or for other situations in which an untoward medical event has not occurred; (iv) abnormal laboratory value, unless it is clinically significant according to the Investigator, requires intervention, or results in a delay, discontinuation or change in the dose of study drug; (v) overdose of study drug or concomitant medication unaccompanied by signs/symptoms; if sign/symptoms occur, the final diagnosis should be recorded as an AE; (vi) pregnancy by itself, unless a complication occurs during pregnancy leading to hospitalization; in this case, the medical condition that leads to the hospitalization is to be recorded as the AE; and (vii) significant worsening of the disease under investigation which is captured as an efficacy parameter in this study and, thus, is not recorded as an AE.

[0250] The term serious adverse event (SAE) as used herein refers to an adverse event that results in any of the following outcomes: (i) death; (ii) life-threatening adverse experience (i.e., immediate risk of death from the event as it occurred; this does not include an adverse event that, had it occurred in a more serious form, might have caused death); (iii) persistent or significant disability/incapacitation; (iv) hospitalization or prolongation of existing hospitalization; and (v) congenital anomaly/birth defect. Important medical events that can not result in death, be life-threatening, or require hospitalization can be considered serious when, based on medical judgment, they can jeopardize the patient or can require medical or surgical intervention to prevent one of the outcomes listed in this definition. Hospitalizations due to the underlying disease will not be reported as an SAE unless there is reason to suspect a causal relationship with the study drug.

[0251] An AE or suspected adverse reaction is considered “unexpected” (referred to as Unexpected Adverse Event (UAE) if it is not listed in the peptidomimetic macrocycle Investigator's Brochure or is not listed at the specificity or severity that has been observed; or, is not consistent with the risk information described in the protocol or elsewhere. For example, under this definition, hepatic necrosis would be unexpected (by virtue of greater severity) if the Investigator's Brochure referred only to elevated hepatic enzymes or hepatitis. Similarly, cerebral thromboembolism and cerebral vasculitis would be unexpected (by virtue of greater specificity) if the Investigator's Brochure listed only cerebral vascular accidents. “Unexpected,” as used in this definition, also refers to AEs or suspected adverse reactions that are mentioned in the Investigator's Brochure as occurring with a class of drugs or as anticipated from the pharmacological properties of the peptidomimetic macrocycle but are not specifically mentioned as occurring with the peptidomimetic macrocycle.

[0252] A “Dose-Limiting Toxicity” (DLT) as used herein is defined as any Grade ≧3 AE that is considered to be possibly, probably, or definitely related to the study drug, with the following exceptions: (1) for nausea, emesis, diarrhea, rash, or mucositis, only Grade ≧3 AE that do not respond within 48 hours to standard supportive/pharmacological treatment will be considered DLT; (2) for electrolyte imbalances, only Grade ≧3 AE that do not respond to correction within 24 hours will be considered DLT; (3) for infusion reactions, only a Grade 3 reaction which caused hospitalization or Grade 4 will be considered DLT. In addition, specific hematologic DLTs are defined as:
[0253] Thrombocytopenia—Grade 4 of any duration, Grade 3 for ≧7 days, or Grade 3 associated with clinically significant bleeding;
[0254] Neutropenia—Grade 4 for ≧3 days, or any Grade ≧3 febrile neutropenia

[0255] The above criteria can be used to make individual patient determinations regarding dose reductions, interruptions or discontinuation throughout the course of the trial, but DLTs occurring during Cycle 1 will be used to inform safety and tolerability assessments for dose escalation decisions. The DLT-evaluable population will include all patients in Phase 1 Dose Escalation who experience a DLT during the first cycle of treatment.

[0256] The “Maximum Tolerated Dose” (MTD) as used herein is defined as the dose at which ≦1 of 6 patients experiences a treatment-related toxicity that qualifies as a DLT, with the next higher dose having ≧2 of up to 6 patients experiencing a DLT. The MTD can not be established until all patients enrolled in the cohort have completed Cycle 1, discontinued treatment or had a dose reduction. Previously established tolerability of a dose level will be reevaluated if DLTs are observed in later cycles.

[0257] The “Optimal Biological Dose” (OBD) as used herein is defined as the dose at which for each treatment arm, the safety review committee identifies before the MTD is reached. Such OBD would be derived from the evaluation of available safety, PK, PD, and.or preliminary efficacy information from the dose escalation portion of the study

[0258] “Measurable disease” (MD) as used herein is defined by the presence of at least one measurable CTC or MNBC.

[0259] Measurable CTCs and MNBCs are defined as those from a biological sample that can be accurately counted.

[0260] “Non-measurable Disease” as used herein include all other lesions.

[0261] “Complete response” (CR) as used herein is defined as the disappearance of all target CTCs and/or MNBCs.

[0262] “Partial response (PR)” as used herein is defined as at least a 30% decrease in the number of CTCs and/or MNBCs.

[0263] “Progressive disease (PD)” as used herein is defined as at least a 20% increase in the number of CTCs and/or MNBCs.

[0264] “Stable disease” (SD) as used herein is defined as neither sufficient shrinkage to qualify for PR nor sufficient increase to qualify for PD, taking as reference the smallest sum diameters while on study.

[0265] The term “subject” or “patient” encompasses mammals and non-mammals. Examples of mammals include, but are not limited to, humans; non-human primates such as chimpanzees, and other apes and monkey species; farm animals such as cattle, horses, sheep, goats, swine; domestic animals such as rabbits, dogs, and cats; laboratory animals including rodents, such as rats, mice and guinea pigs, and the like. Examples of non-mammals include, but are not limited to, birds, fish and the like. In one embodiment of the methods and compositions provided herein, the mammal is a human.

[0266] Unless otherwise stated, any compounds (including peptidomimetic macrocycles, macrocycle precursors, and other compositions) are also meant to encompass compounds which differ only in the presence of one or more isotopically enriched atoms. For example, compounds having the described structures except for the replacement of a hydrogen by a deuterium or tritium, or the replacement of a carbon by ¹³C- or ¹⁴C-enriched carbon are within the scope of this disclosure.

[0267] In some embodiments, the compounds disclosed herein can contain unnatural proportions of atomic isotopes at one or more of atoms that constitute such compounds. For example, the compounds can be radiolabeled with radioactive isotopes, such as for example tritium (³H), iodine-125 (¹²⁵I) or carbon-14 (¹⁴C). In other embodiments, one or more carbon atoms are replaced with a silicon atom. All isotopic variations of the compounds disclosed herein, whether radioactive or not, are contemplated herein.

[0268] The circulating half-life of the peptidomimetic macrocycles in human blood can be about 1-24 h. For example the circulating half-life of the peptidomimetic macrocycles in human blood can me about 2-24 h, 4-24 h, 6-24 h, 8-24 h, 10-24 h, 12-24 h, 14-24 h, 16-24 h, 18-24 h, 20-24 h, 22-24 h, 1-20 h, 4-20 h, 6-20 h, 8-20 h, 10-20 h, 12-20 h, 14-20 h, 16-20 h, 18-20 h, 1-16 h, 4-16 h, 6-16 h, 8-16 h, 10-16 h, 12-16 h, 14-16 h, 1-12 h, 4-12 h, 6-12 h, 8-12 h, 10-12 h, 1-8 h, 4-8 h, 6-8 h, or 1-4 h. In some examples, the circulating half-life of the peptidomimetic macrocycles in human blood can be bout 1-12 h, for example about 1 h, 2 h, 3 h, 4 h, 5 h, 6 h, 7 h, 8 h, 9 h, 10 h, 11 h, or 12 h. In some examples, the circulating half-life of the peptidomimetic macrocycles in human blood is about 2 h. In some examples, the circulating half-life of the peptidomimetic macrocycles in human blood is about 4 h. In some examples, the circulating half-life of the peptidomimetic macrocycles in human blood is about 6 h. In some examples, the circulating half-life of the peptidomimetic macrocycles in human blood is about 8 h. In some examples, the circulating half-life of the peptidomimetic macrocycles in human blood is about 10 h.

[0269] The half-life of the peptidomimetic macrocycles in biological tissue can be about 1-24 h. For example the circulating half-life of the peptidomimetic macrocycles in human blood can me about 1-24 h, 5-24 h, 10-24 h, 15-24 h, 20-24 h, 1-22 h, 5-22 h, 10-22 h, 15-22 h, 20-22 h, 1-20 h, 5-20 h, 15-20 h, 1-18 h, 5-18 h, 10-18 h, 15-18 h, 1-16 h, 5-16 h, 10-16 h, 15- 16 h, 1-14 h, 5-14 h, 10-14 h, 1-12 h, 5-12 h, 10-12 h, 1-10 h, 5-10 h, 1-8 h, 5-8 h, 1-6 h, 5- 6 h, or 1-4 h. In some examples, the circulating half-life of the peptidomimetic macrocycles in human blood can be bout 5-20 h, for example about 5 h, 6 h, 7 h, 8 h, 9 h, 10 h, 11 h, 12 h, 13 h, 14 h, 15 h, 16 h, 17 h, 18 h, 19 h or 20 h. In some examples, the circulating half-life of the peptidomimetic macrocycles in human blood is about 2 h. In some examples, the circulating half-life of the peptidomimetic macrocycles in human blood is about 4 h. In some examples, the circulating half-life of the peptidomimetic macrocycles in human blood is about 6 h. In some examples, the circulating half-life of the peptidomimetic macrocycles in human blood is about 8 h. In some examples, the circulating half-life of the peptidomimetic macrocycles in human blood is about 10 h.

[0270] The circulating half-life of the peptidomimetic macrocycles in human blood can be greater than, equal to, or less than the half-life of the peptidomimetic macrocycles in biological tissue. In some examples, the circulating half-life of the peptidomimetic macrocycles in human blood can be greater than the half-life of the peptidomimetic macrocycles in biological tissue. In some examples, the circulating half-life of the peptidomimetic macrocycles in human blood can be equal to the half-life of the peptidomimetic macrocycles in biological tissue. In some examples, the half-life of the peptidomimetic macrocycles in biological tissue is greater than the circulating half-life of the peptidomimetic macrocycles in human blood. This can facilitate administration of the peptidomimetic macrocycles at a lower dose and/or at lower frequency. In some embodiments, the half-life of the peptidomimetic macrocycles in biological tissue is at least 1 h, at least 2 h, at least 3 h, at least 4 h, at least 5 h, at least 6 h, at least 7 h, at least 8 h, at least 9 h, at least 10 h, at least 11 h, or at least 12 h greater than the than the circulating half-life of the peptidomimetic macrocycles in human blood. In some examples, the circulating half-life of the peptidomimetic macrocycles in human blood is about 4 h and the half-life of the in biological tissue is about 10 h. In some examples, the circulating half-life of the peptidomimetic macrocycles in human blood is about 6 h and the half-life of the in biological tissue is about 10 h.

[0271] The details of one or more particular embodiments of the invention are set forth in the accompanying drawings and the description below. Other features, objects, and advantages of the invention will be apparent from the description and drawings, and from the claims.

### Preparation of Peptidomimetic Macrocycles

[0272] Peptidomimetic macrocycles of the invention may be prepared by any of a variety of methods known in the art. For example, any of the residues indicated by “X” in Tables 1-3 and 9 may be substituted with a residue capable of forming a crosslinker with a second residue in the same molecule or a precursor of such a residue.

[0273] Peptidomimetic macrocycles can be prepared by any of a variety of methods known in the art. For example, any of the residues indicated by “$” or “$r8” in Tables 10-13 can be substituted with a residue capable of forming a crosslinker with a second residue in the same molecule or a precursor of such a residue.

[0274] Various methods to effect formation of peptidomimetic macrocycles are known in the art. For example, a preparation of a peptidomimetic macrocycles disclosed is described in Schafmeister et al., J. Am. Chem. Soc. 122:5891-5892 (2000); Schafmeister & Verdin, J. Am. Chem. Soc. 122:5891 (2005); Walensky et al., Science 305:1466-1470 (2004); U.S. Pat. No. 7,192,713 and PCT application WO 2008/121767. The α,α-disubstituted amino acids and amino acid precursors disclosed in the cited references may be employed in synthesis of the peptidomimetic macrocycle precursor polypeptides. For example, the “S5-olefin amino acid” is (S)-α-(2′-pentenyl) alanine and the “R8 olefin amino acid” is (R)-α-(2′-octenyl) alanine. Following incorporation of such amino acids into precursor polypeptides, the terminal olefins are reacted with a metathesis catalyst, leading to the formation of the peptidomimetic macrocycle. In various embodiments, the following amino acids may be employed in the synthesis of the peptidomimetic macrocycle:

[chemical structure]

[0275] Methods for the preparation of disclosed macrocycles are described, for example, in U.S. Pat. No. 7,202,332. Additional methods of forming peptidomimetic macrocycles which are envisioned as suitable to perform the present invention include those disclosed by Mustapa, M. Firouz Mohd et al., J. Org. Chem (2003), 68, pp. 8193-8198; Yang, Bin et al. Bioorg Med. Chem. Lett. (2004), 14, pp. 1403-1406; U.S. Pat. No. 5,364,851; U.S. Pat. No. 5,446,128; U.S. Pat. No. 5,824,483; U.S. Pat. No. 6,713,280; and U.S. Pat. No. 7,202,332. In such embodiments, aminoacid precursors are used containing an additional substituent R— at the alpha position. Such aminoacids are incorporated into the macrocycle precursor at the desired positions, which may be at the positions where the crosslinker is substituted or, alternatively, elsewhere in the sequence of the macrocycle precursor. Cyclization of the precursor is then affected according to the indicated method.

[0276] Peptidomimetic macrocycles disclosed can be prepared by any of a variety of methods known in the art. For example, macrocycles having residues indicated by “$4rn6” or “$4a5” in Tables 23-25 can be substituted with a residue capable of forming a crosslinker with a second residue in the same molecule or a precursor of such a residue.

[0277] In some embodiments, the synthesis of these peptidomimetic macrocycles involves a multi-step process that features the synthesis of a peptidomimetic precursor containing an azide moiety and an alkyne moiety; followed by contacting the peptidomimetic precursor with a macrocyclization reagent to generate a triazole-linked peptidomimetic macrocycle. Such a process is described, for example, in U.S. application Ser. No. 12/037,041, filed on Feb. 25, 2008. Macrocycles or macrocycle precursors are synthesized, for example, by solution phase or solid-phase methods, and can contain both naturally-occurring and non-naturally-occurring amino acids. See, for example, Hunt, “The Non-Protein Amino Acids” in Chemistry and Biochemistry of the Amino Acids, edited by G. C. Barrett, Chapman and Hall, 1985.

[0278] In some embodiments of the macrocycles disclosed, an azide is linked to the α-carbon of a residue and an alkyne is attached to the α-carbon of another residue. In some embodiments, the azide moieties are azido-analogs of amino acids L-lysine, D-lysine, alpha-methyl-L-lysine, alpha-methyl-D-lysine, L-ornithine, D-ornithine, alpha-methyl-L-ornithine or alpha-methyl-D-ornithine. In another embodiment, the alkyne moiety is L-propargylglycine. In yet other embodiments, the alkyne moiety is an amino acid selected from the group consisting of L-propargylglycine, D-propargylglycine, (S)-2-amino-2-methyl-4-pentynoic acid, (R)-2-amino-2-methyl-4-pentynoic acid, (S)-2-amino-2-methyl-5-hexynoic acid, (R)-2-amino-2-methyl-5-hexynoic acid, (S)-2-amino-2-methyl-6-heptynoic acid, (R)-2-amino-2-methyl-6-heptynoic acid, (S)-2-amino-2-methyl-7-octynoic acid, (R)-2-amino-2-methyl-7-octynoic acid, (S)-2-amino-2-methyl-8-nonynoic acid and (R)-2-amino-2-methyl-8-nonynoic acid.

[0279] In some embodiments, provided herein is a method for synthesizing a peptidomimetic macrocycle disclosed, the method comprising the steps of contacting a peptidomimetic precursor of formulas:

[chemical structure]

[0280] with a macrocyclization reagent;
[0281] wherein v, w, x, y, z, A, B, C, D, E, R₁, R₂, R₇, R₈, L₁ and L₂ are as defined above; R₁₂ is —H when the macrocyclization reagent is a Cu reagent and R₁₂ is —H or alkyl when the macrocyclization reagent is a Ru reagent; and further wherein said contacting step results in a covalent linkage being formed between the alkyne and azide moiety in the precursor. For example, R₁₂ may be methyl when the macrocyclization reagent is a Ru reagent.

[0282] In some embodiments, provided herein is a method for synthesizing a peptidomimetic macrocycle disclosed, the method comprising the steps of contacting a peptidomimetic precursor of formula:

[chemical structure]

[0283] with a compound formula X-L₂-Y,
[0284] wherein v, w, x, y, z, A, B, C, D, E, R₁, R₂, R₇, R₈, L₁ and L₂ are as defined for the compound previously disclosed; and X and Y are each independently a reactive group capable of reacting with a thiol group;
[0285] and further wherein said contacting step results in a covalent linkage being formed between the two thiol groups.

[0286] In the peptidomimetic macrocycles disclosed herein, at least one of R₁ and R₂ is alkyl, alkenyl, alkynyl, arylalkyl, cycloalkyl, cycloalkylalkyl, heteroalkyl, or heterocycloalkyl, unsubstituted or substituted with halo-. In some embodiments, both R₁ and R₂ are independently alkyl, alkenyl, alkynyl, arylalkyl, cycloalkyl, cycloalkylalkyl, heteroalkyl, or heterocycloalkyl, unsubstituted or substituted with halo-. In some embodiments, at least one of A, B, C, D or E is an α,α-disubstituted amino acid. In one example, B is an α,α-disubstituted amino acid. For instance, at least one of A, B, C, D or E is 2-aminoisobutyric acid.

[0287] For example, at least one of R₁ and R₂ is alkyl, unsubstituted or substituted with halo-. In another example, both R₁ and R₂ are independently alkyl, unsubstituted or substituted with halo-. In some embodiments, at least one of R₁ and R₂ is methyl. In other embodiments, R₁ and R₂ are methyl. The macrocyclization reagent may be a Cu reagent or a Ru reagent.

[0288] In some embodiments, the peptidomimetic precursor is purified prior to the contacting step. In other embodiments, the peptidomimetic macrocycle is purified after the contacting step. In still other embodiments, the peptidomimetic macrocycle is refolded after the contacting step. The method may be performed in solution, or, alternatively, the method may be performed on a solid support.

[0289] Also envisioned herein is performing the method disclosed herein in the presence of a target macromolecule that binds to the peptidomimetic precursor or peptidomimetic macrocycle under conditions that favor said binding. In some embodiments, the method is performed in the presence of a target macromolecule that binds preferentially to the peptidomimetic precursor or peptidomimetic macrocycle under conditions that favor said binding. The method may also be applied to synthesize a library of peptidomimetic macrocycles.

[0290] In some embodiments, an alkyne moiety of the peptidomimetic precursor for making a compound disclosed is a sidechain of an amino acid selected from the group consisting of L-propargylglycine, D-propargylglycine, (S)-2-amino-2-methyl-4-pentynoic acid, (R)-2-amino-2-methyl-4-pentynoic acid, (S)-2-amino-2-methyl-5-hexynoic acid, (R)-2-amino-2-methyl-5-hexynoic acid, (S)-2-amino-2-methyl-6-heptynoic acid, (R)-2-amino-2-methyl-6-heptynoic acid, (S)-2-amino-2-methyl-7-octynoic acid, (R)-2-amino-2-methyl-7-octynoic acid, (S)-2-amino-2-methyl-8-nonynoic acid, and (R)-2-amino-2-methyl-8-nonynoic acid. In other embodiments, an azide moiety of the peptidomimetic precursor for making a compound disclosed is a sidechain of an amino acid selected from the group consisting of ε-azido-L-lysine, ε-azido-D-lysine, ε-azido-α-methyl-L-lysine, ε-azido-α-methyl-D-lysine, δ-azido-α-methyl-L-ornithine, and δ-azido-α-methyl-D-ornithine.

[0291] In some embodiments, a thiol group of the peptidomimetic precursor for making a compound disclosed is a sidechain of an amino acid selected from the group consisting of L-cysteine, D-cysteine, L-N-methylcysteine, D-N-methylcysteine, L-homocysteine, D-homocysteine, L-N-methylhomocysteine, D-N-methylhomocysteine, α-methyl-L-cysteine, α-methyl-D-cysteine, α-methyl-L-homocysteine, α-methyl-D-homocysteine, L-penicillamine, D-penicillamine, L-N-methylpenicillamine, D-N-methylpenicillamine and all forms suitably protected for liquid or solid phase peptide synthesis.

[0292] In some embodiments, x+y+z is 3, and A, B and C are independently natural or non-natural amino acids. In other embodiments, x+y+z is 6, and A, B and C are independently natural or non-natural amino acids.

[0293] In some embodiments, the contacting step is performed in a solvent selected from the group consisting of protic solvent, aqueous solvent, organic solvent, and mixtures thereof. For example, the solvent may be chosen from the group consisting of H₂O, THF, THF/H₂O, tBuOH/H₂O, DMF, DIPEA, CH₃CN or CH₂Cl₂, ClCH₂CH₂Cl or a mixture thereof. The solvent may be a solvent which favors helix formation.

[0294] Alternative but equivalent protecting groups, leaving groups or reagents are substituted, and certain of the synthetic steps are performed in alternative sequences or orders to produce the desired compounds. Synthetic chemistry transformations and protecting group methodologies (protection and deprotection) useful in synthesizing the compounds described herein include, for example, those such as described in Larock, Comprehensive Organic Transformations, VCH Publishers (1989); Greene and Wuts, Protective Groups in Organic Synthesis, 2d. Ed., John Wiley and Sons (1991); Fieser and Fieser, Fieser and Fieser's Reagents for Organic Synthesis, John Wiley and Sons (1994); and Paquette, ed., Encyclopedia of Reagents for Organic Synthesis, John Wiley and Sons (1995), and subsequent editions thereof.

[0295] The peptidomimetic macrocycles disclosed herein are made, for example, by chemical synthesis methods, such as described in Fields et al., Chapter 3 in Synthetic Peptides: A User's Guide, ed. Grant, W. H. Freeman & Co., New York, N.Y., 1992, p. 77. Hence, for example, peptides are synthesized using the automated Merrifield techniques of solid phase synthesis with the amine protected by either tBoc or Fmoc chemistry using side chain protected amino acids on, for example, an automated peptide synthesizer (e.g., Applied Biosystems (Foster City, Calif.), Model 430A, 431, or 433).

[0296] One manner of producing the peptidomimetic precursors and peptidomimetic macrocycles described herein uses solid phase peptide synthesis (SPPS). The C-terminal amino acid is attached to a cross-linked polystyrene resin via an acid labile bond with a linker molecule. This resin is insoluble in the solvents used for synthesis, making it relatively simple and fast to wash away excess reagents and by-products. The N-terminus is protected with the Fmoc group, which is stable in acid, but is removable by base. Side chain functional groups are protected as necessary with base stable, acid labile groups.

[0297] Longer peptidomimetic precursors are produced, for example, by conjoining individual synthetic peptides using native chemical ligation. Alternatively, the longer synthetic peptides are biosynthesized by well known recombinant DNA and protein expression techniques. Such techniques are provided in well-known standard manuals with detailed protocols. To construct a gene encoding a peptidomimetic precursor disclosed herein, the amino acid sequence is reverse translated to obtain a nucleic acid sequence encoding the amino acid sequence, preferably with codons that are optimum for the organism in which the gene is to be expressed. Next, a synthetic gene is made, typically by synthesizing oligonucleotides which encode the peptide and any regulatory elements, if necessary. The synthetic gene is inserted in a suitable cloning vector and transfected into a host cell. The peptide is then expressed under suitable conditions appropriate for the selected expression system and host. The peptide is purified and characterized by standard methods.

[0298] The peptidomimetic precursors are made, for example, in a high-throughput, combinatorial fashion using, for example, a high-throughput polychannel combinatorial synthesizer (e.g., Thuramed TETRAS multichannel peptide synthesizer from CreoSalus, Louisville, Ky. or Model Apex 396 multichannel peptide synthesizer from AAPPTEC, Inc., Louisville, Ky.).

[0299] The following synthetic schemes are provided solely to illustrate the present invention and are not intended to limit the scope of the invention, as described herein.

[0300] Synthetic schemes 1-5 describe the preparation of the peptidomimetic macrocycles disclosed. To simplify the drawings, the illustrative schemes depict azido amino acid analogs ε-azido-α-methyl-L-lysine and ε-azido-α-methyl-D-lysine, and alkyne amino acid analogs L-propargylglycine, (S)-2-amino-2-methyl-4-pentynoic acid, and (S)-2-amino-2-methyl-6-heptynoic acid. Thus, in the following synthetic schemes, each R₁, R₂, R₇ and R₈ is —H; each L₁ is —(CH₂)₄—; and each L₂ is —(CH₂)—. However, as noted throughout the detailed description above, many other amino acid analogs can be employed in which R₁, R₂, R₇, R₈, L₁ and L₂ can be independently selected from the various structures disclosed herein.

[chemical structure]

[chemical structure]

[0301] Synthetic Scheme 1 describes the preparation of several compounds useful for preparing compounds disclosed herein. Ni(II) complexes of Schiff bases derived from the chiral auxiliary (S)-2-[N—(N′-benzylpropyl)amino]benzophenone (BPB) and amino acids such as glycine or alanine are prepared as described in Belokon et al. (1998), Tetrahedron Asymm. 9:4249-4252. The resulting complexes are subsequently reacted with alkylating reagents comprising an azido or alkynyl moiety to yield enantiomerically enriched compounds disclosed herein. If desired, the resulting compounds can be protected for use in peptide synthesis.

[chemical structure]

[0302] In the general method for the synthesis of peptidomimetic macrocycles disclosed shown in Synthetic Scheme 2, the peptidomimetic precursor contains an azide moiety and an alkyne moiety and is synthesized by solution-phase or solid-phase peptide synthesis (SPPS) using the commercially available amino acid N-α-Fmoc-L-propargylglycine and the N-α-Fmoc-protected forms of the amino acids (S)-2-amino-2-methyl-4-pentynoic acid, (S)-2-amino-6-heptynoic acid, (S)-2-amino-2-methyl-6-heptynoic acid, N-methyl-ε-azido-L-lysine, and N-methyl-ε-azido-D-lysine. The peptidomimetic precursor is then deprotected and cleaved from the solid-phase resin by standard conditions (e.g., strong acid such as 95% TFA). The peptidomimetic precursor is reacted as a crude mixture or is purified prior to reaction with a macrocyclization reagent such as a Cu(I) in organic or aqueous solutions (Rostovtsev et al. (2002), Angew. Chem. Int. Ed. 41:2596-2599; Tornoe et al. (2002), J. Org. Chem. 67:3057-3064; Deiters et al. (2003), J. Am. Chem. Soc. 125:11782-11783; Punna et al. (2005), Angew. Chem. Int. Ed. 44:2215-2220). In one embodiment, the triazole forming reaction is performed under conditions that favor α-helix formation. In one embodiment, the macrocyclization step is performed in a solvent chosen from the group consisting of H₂O, THF, CH₃CN, DMF, DIPEA, tBuOH or a mixture thereof. In another embodiment, the macrocyclization step is performed in DMF. In some embodiments, the macrocyclization step is performed in a buffered aqueous or partially aqueous solvent.

[chemical structure]

[0303] In the general method for the synthesis of peptidomimetic macrocycles disclosed shown in Synthetic Scheme 3, the peptidomimetic precursor contains an azide moiety and an alkyne moiety and is synthesized by solid-phase peptide synthesis (SPPS) using the commercially available amino acid N-σ-Fmoc-L-propargylglycine and the N-α-Fmoc-protected forms of the amino acids (S)-2-amino-2-methyl-4-pentynoic acid, (S)-2-amino-6-heptynoic acid, (S)-2-amino-2-methyl-6-heptynoic acid, N-methyl-ε-azido-L-lysine, and N-methyl-ε-azido-D-lysine. The peptidomimetic precursor is reacted with a macrocyclization reagent such as a Cu(I) reagent on the resin as a crude mixture (Rostovtsev et al. (2002), Angew. Chem. Int. Ed. 41:2596-2599; Tornoe et al. (2002), J. Org. Chem. 67:3057-3064; Deiters et al. (2003), J. Am. Chem. Soc. 125:11782-11783; Punna et al. (2005), Angew. Chem. Int. Ed. 44:2215-2220). The resultant triazole-containing peptidomimetic macrocycle is then deprotected and cleaved from the solid-phase resin by standard conditions (e.g., strong acid such as 95% TFA). In some embodiments, the macrocyclization step is performed in a solvent chosen from the group consisting of CH₂Cl₂, ClCH₂CH₂Cl, DMF, THF, NMP, DIPEA, 2,6-lutidine, pyridine, DMSO, H₂O or a mixture thereof. In some embodiments, the macrocyclization step is performed in a buffered aqueous or partially aqueous solvent.

[chemical structure]

[0304] In the general method for the synthesis of peptidomimetic macrocycles disclosed shown in Synthetic Scheme 4, the peptidomimetic precursor contains an azide moiety and an alkyne moiety and is synthesized by solution-phase or solid-phase peptide synthesis (SPPS) using the commercially available amino acid N-α-Fmoc-L-propargylglycine and the N-α-Fmoc-protected forms of the amino acids (S)-2-amino-2-methyl-4-pentynoic acid, (S)-2-amino-6-heptynoic acid, (S)-2-amino-2-methyl-6-heptynoic acid, N-methyl-ε-azido-L-lysine, and N-methyl-ε-azido-D-lysine. The peptidomimetic precursor is then deprotected and cleaved from the solid-phase resin by standard conditions (e.g., strong acid such as 95% TFA). The peptidomimetic precursor is reacted as a crude mixture or is purified prior to reaction with a macrocyclization reagent such as a Ru(II) reagents, for example Cp*RuCl(PPh₃)₂ or [Cp*RuCl]₄ (Rasmussen et al. (2007), Org. Lett. 9:5337-5339; Zhang et al. (2005), J. Am. Chem. Soc. 127:15998-15999). In some embodiments, the macrocyclization step is performed in a solvent chosen from the group consisting of DMF, CH₃CN and THF.

[chemical structure]

[0305] In the general method for the synthesis of peptidomimetic macrocycles of disclosed shown in Synthetic Scheme 5, the peptidomimetic precursor contains an azide moiety and an alkyne moiety and is synthesized by solid-phase peptide synthesis (SPPS) using the commercially available amino acid N-α-Fmoc-L-propargylglycine and the N-α-Fmoc-protected forms of the amino acids (S)-2-amino-2-methyl-4-pentynoic acid, (S)-2-amino-6-heptynoic acid, (S)-2-amino-2-methyl-6-heptynoic acid, N-methyl-ε-azido-L-lysine, and N-methyl-ε-azido-D-lysine. The peptidomimetic precursor is reacted with a macrocyclization reagent such as a Ru(II) reagent on the resin as a crude mixture. For example, the reagent can be Cp*RuCl(PPh₃)₂ or [Cp*RuCl]₄ (Rasmussen et al. (2007), Org. Lett. 9:5337-5339; Zhang et al. (2005), J. Am. Chem. Soc. 127:15998-15999). In some embodiments, the macrocyclization step is performed in a solvent chosen from the group consisting of CH₂Cl₂, ClCH₂CH₂Cl, CH₃CN, DMF, and THF.

[0306] In some embodiments, a peptidomimetic macrocycle disclosed comprises a halogen group substitution on a triazole moiety, for example an iodo substitution. Such peptidomimetic macrocycles may be prepared from a precursor having the partial structure and using the cross-linking methods taught herein. Crosslinkers of any length, as described herein, may be prepared comprising such substitutions. In one embodiment, the peptidomimetic macrocycle is prepared according to the scheme shown below. The reaction is performed, for example, in the presence of CuI and an amine ligand such as TEA or TTTA. See, e.g., Hein et al. Angew. Chem., Int. Ed. 2009, 48, 8018-8021.

[chemical structure]

[0307] In other embodiments, an iodo-substituted triazole is generated according to the scheme shown below. For example, the second step in the reaction scheme below is performed using, for example, CuI and N-bromosuccinimide (NBS) in the presence of THF (see, e.g. Zhang et al., J. Org. Chem. 2008, 73, 3630-3633). In other embodiments, the second step in the reaction scheme shown below is performed, for example, using CuI and an iodinating agent such as ICl (see, e.g. Wu et al., Synthesis 2005, 1314-1318.)

[chemical structure]

[0308] In some embodiments, an iodo-substituted triazole moiety is used in a cross-coupling reaction, such as a Suzuki or Sonogashira coupling, to afford a peptidomimetic macrocycle comprising a substituted crosslinker. Sonogashira couplings using an alkyne as shown below may be performed, for example, in the presence of a palladium catalyst such as Pd(PPh₃)₂Cl₂, CuI, and in the presence of a base such as triethylamine. Suzuki couplings using an arylboronic or substituted alkenyl boronic acid as shown below may be performed, for example, in the presence of a catalyst such as Pd(PPh₃)₄, and in the presence of a base such as K₂CO₃.

[chemical structure]

[0309] Any suitable triazole substituent group which reacts with the iodo-substituted triazole can be used in Suzuki couplings described herein. Example triazole substituents for use in Suzuki couplings are shown below:

[chemical structure]

[0310] wherein “Cyc” is a suitable aryl, cycloalkyl, cycloalkenyl, heteroaryl, or heterocyclyl group, unsubstituted or optionally substituted with an Rₐ or R_{b} group as described below.

[0311] In some embodiments, the substituent is:

[chemical structure]

[0312] Any suitable substituent group which reacts with the iodo-substituted triazole can be used in Sonogashira couplings described herein. Example triazole substituents for use in Sonogashira couplings are shown below:

[chemical structure]

[0313] wherein “Cyc” is a suitable aryl, cycloalkyl, cycloalkenyl, heteroaryl, or heterocyclyl group, unsubstituted or optionally substituted with an Rₐ or R_{b} group as described below.

[0314] In some embodiments, the triazole substituent is:

[chemical structure]

[0315] In some embodiments, the Cyc group shown above is further substituted by at least one Rₐ or R_{b} substituent. In some embodiments, at least one of Rₐ and R_{b} is independently:

[chemical structure]

[0316] In other embodiments, the triazole substituent is

[chemical structure]

and at least one of Rₐ and R_{b} is alkyl (including hydrogen, methyl, or ethyl), or:

[chemical structure]

[0317] The present invention contemplates the use of non-naturally-occurring amino acids and amino acid analogs in the synthesis of the peptidomimetic macrocycles disclosed described herein. Any amino acid or amino acid analog amenable to the synthetic methods employed for the synthesis of stable triazole containing peptidomimetic macrocycles can be used in the present invention. For example, L-propargylglycine is contemplated as a useful amino acid in the present invention. However, other alkyne-containing amino acids that contain a different amino acid side chain are also useful in the invention. For example, L-propargylglycine contains one methylene unit between the α-carbon of the amino acid and the alkyne of the amino acid side chain. The invention also contemplates the use of amino acids with multiple methylene units between the α-carbon and the alkyne. Also, the azido-analogs of amino acids L-lysine, D-lysine, alpha-methyl-L-lysine, and alpha-methyl-D-lysine are contemplated as useful amino acids in the present invention. However, other terminal azide amino acids that contain a different amino acid side chain are also useful in the invention. For example, the azido-analog of L-lysine contains four methylene units between the α-carbon of the amino acid and the terminal azide of the amino acid side chain. The invention also contemplates the use of amino acids with fewer than or greater than four methylene units between the α-carbon and the terminal azide. The following Table 4 shows some amino acids useful in the preparation of peptidomimetic macrocycles disclosed herein.

TABLE 4

| | |
|---|---|
| [chemical structure] | [chemical structure] |
| [chemical structure] | [chemical structure] |
| [chemical structure] | [chemical structure] |
| [chemical structure] | [chemical structure] |
| [chemical structure] | [chemical structure] |
| [chemical structure] | [chemical structure] |
| [chemical structure] | [chemical structure] |
| [chemical structure] | [chemical structure] |
| [chemical structure] | [chemical structure] |
| [chemical structure] | [chemical structure] |

[0318] In some embodiments the amino acids and amino acid analogs are of the D-configuration. In other embodiments they are of the L-configuration. In some embodiments, some of the amino acids and amino acid analogs contained in the peptidomimetic are of the D-configuration while some of the amino acids and amino acid analogs are of the L-configuration. In some embodiments the amino acid analogs are α,α-disubstituted, such as α-methyl-L-propargylglycine, α-methyl-D-propargylglycine, ε-azido-alpha-methyl-L-lysine, and ε-azido-alpha-methyl-D-lysine. In some embodiments the amino acid analogs are N-alkylated, e.g., N-methyl-L-propargylglycine, N-methyl-D-propargylglycine, N-methyl-ε-azido-L-lysine, and N-methyl-ε-azido-D-lysine.

[0319] The preparation of macrocycles disclosed is described, for example, in U.S. application Ser. No. 11/957,325, filed on Dec. 17, 2007 and herein incorporated by reference. Synthetic Schemes 6-9 describe the preparation of such compounds disclosed. To simplify the drawings, the illustrative schemes depict amino acid analogs derived from L- or D-cysteine, in which L₁ and L₃ are both —(CH₂)—. However, as noted throughout the detailed description above, many other amino acid analogs can be employed in which L₁ and L₃ can be independently selected from the various structures disclosed herein. The symbols “[AA]ₘ”, “[AA]ₙ”, “[AA]ₒ” represent a sequence of amide bond-linked moieties such as natural or unnatural amino acids. As described previously, each occurrence of “AA” is independent of any other occurrence of “AA”, and a formula such as “[AA]ₘ” encompasses, for example, sequences of non-identical amino acids as well as sequences of identical amino acids.

[chemical structure]

[0320] In Scheme 6, the peptidomimetic precursor contains two —SH moieties and is synthesized by solid-phase peptide synthesis (SPPS) using commercially available N-α-Fmoc amino acids such as N-α-Fmoc-S-trityl-L-cysteine or N-α-Fmoc-S-trityl-D-cysteine. Alpha-methylated versions of D-cysteine or L-cysteine are generated by known methods (Seebach et al. (1996), Angew. Chem. Int. Ed. Engl. 35:2708-2748, and references therein) and then converted to the appropriately protected N-α-Fmoc-S-trityl monomers by known methods (“Bioorganic Chemistry: Peptides and Proteins”, Oxford University Press, New York: 1998, the entire contents of which are incorporated herein by reference). The precursor peptidomimetic is then deprotected and cleaved from the solid-phase resin by standard conditions (e.g., strong acid such as 95% TFA). The precursor peptidomimetic is reacted as a crude mixture or is purified prior to reaction with X-L₂-Y in organic or aqueous solutions. In some embodiments the alkylation reaction is performed under dilute conditions (i.e. 0.15 mmol/L) to favor macrocyclization and to avoid polymerization. In some embodiments, the alkylation reaction is performed in organic solutions such as liquid NH₃ (Mosberg et al. (1985), J. Am. Chem. Soc. 107:2986-2987; Szewczuk et al. (1992), Int. J. Peptide Protein Res. 40:233-242), NH₃/MeOH, or NH₃/DMF (Or et al. (1991), J. Org. Chem. 56:3146-3149). In other embodiments, the alkylation is performed in an aqueous solution such as 6 M guanidinium HCl, pH 8 (Brunel et al. (2005), Chem. Commun. (20):2552-2554). In other embodiments, the solvent used for the alkylation reaction is DMF or dichloroethane.

[chemical structure]

[0321] In Scheme 7, the precursor peptidomimetic contains two or more —SH moieties, of which two are specially protected to allow their selective deprotection and subsequent alkylation for macrocycle formation. The precursor peptidomimetic is synthesized by solid-phase peptide synthesis (SPPS) using commercially available N-α-Fmoc amino acids such as N-α-Fmoc-S-p-methoxytrityl-L-cysteine or N-α-Fmoc-S-p-methoxytrityl-D-cysteine. Alpha-methylated versions of D-cysteine or L-cysteine are generated by known methods (Seebach et al. (1996), Angew. Chem. Int. Ed. Engl. 35:2708-2748, and references therein) and then converted to the appropriately protected N-α-Fmoc-S-p-methoxytrityl monomers by known methods (Bioorganic Chemistry: Peptides and Proteins, Oxford University Press, New York: 1998, the entire contents of which are incorporated herein by reference). The Mmt protecting groups of the peptidomimetic precursor are then selectively cleaved by standard conditions (e.g., mild acid such as 1% TFA in DCM). The precursor peptidomimetic is then reacted on the resin with X-L₂-Y in an organic solution. For example, the reaction takes place in the presence of a hindered base such as diisopropylethylamine. In some embodiments, the alkylation reaction is performed in organic solutions such as liquid NH₃ (Mosberg et al. (1985), J. Am. Chem. Soc. 107:2986-2987; Szewczuk et al. (1992), Int. J. Peptide Protein Res. 40:233-242), NH₃/MeOH or NH₃/DMF (Or et al. (1991), J. Org. Chem. 56:3146-3149). In other embodiments, the alkylation reaction is performed in DMF or dichloroethane. The peptidomimetic macrocycle is then deprotected and cleaved from the solid-phase resin by standard conditions (e.g., strong acid such as 95% TFA).

[chemical structure]

[0322] In Scheme 8, the peptidomimetic precursor contains two or more —SH moieties, of which two are specially protected to allow their selective deprotection and subsequent alkylation for macrocycle formation. The peptidomimetic precursor is synthesized by solid-phase peptide synthesis (SPPS) using commercially available N-α-Fmoc amino acids such as N-α-Fmoc-S-p-methoxytrityl-L-cysteine, N-α-Fmoc-S-p-methoxytrityl-D-cysteine, N-α-Fmoc-S—S-t-butyl-L-cysteine, and N-α-Fmoc-S—S-t-butyl-D-cysteine. Alpha-methylated versions of D-cysteine or L-cysteine are generated by known methods (Seebach et al. (1996), Angew. Chem. Int. Ed. Engl. 35:2708-2748, and references therein) and then converted to the appropriately protected N-α-Fmoc-S-p-methoxytrityl or N-α-Fmoc-S-S-t-butyl monomers by known methods (Bioorganic Chemistry: Peptides and Proteins, Oxford University Press, New York: 1998, the entire contents of which are incorporated herein by reference). The S-S-tButyl protecting group of the peptidomimetic precursor is selectively cleaved by known conditions (e.g., 20% 2-mercaptoethanol in DMF, reference: Galande et al. (2005), J. Comb. Chem. 7:174-177). The precursor peptidomimetic is then reacted on the resin with a molar excess of X-L₂-Y in an organic solution. For example, the reaction takes place in the presence of a hindered base such as diisopropylethylamine. The Mmt protecting group of the peptidomimetic precursor is then selectively cleaved by standard conditions (e.g., mild acid such as 1% TFA in DCM). The peptidomimetic precursor is then cyclized on the resin by treatment with a hindered base in organic solutions. In some embodiments, the alkylation reaction is performed in organic solutions such as NH₃/MeOH or NH₃/DMF (Or et al. (1991), J. Org. Chem. 56:3146-3149). The peptidomimetic macrocycle is then deprotected and cleaved from the solid-phase resin by standard conditions (e.g., strong acid such as 95% TFA).

[chemical structure]

[0323] In Scheme 9, the peptidomimetic precursor contains two L-cysteine moieties. The peptidomimetic precursor is synthesized by known biological expression systems in living cells or by known in vitro, cell-free, expression methods. The precursor peptidomimetic is reacted as a crude mixture or is purified prior to reaction with X-L2-Y in organic or aqueous solutions. In some embodiments the alkylation reaction is performed under dilute conditions (i.e. 0.15 mmol/L) to favor macrocyclization and to avoid polymerization. In some embodiments, the alkylation reaction is performed in organic solutions such as liquid NH₃ (Mosberg et al. (1985), J. Am. Chem. Soc. 107:2986-2987; Szewczuk et al. (1992), Int. J. Peptide Protein Res. 40:233-242), NH₃/MeOH, or NH₃/DMF (Or et al. (1991), J. Org. Chem. 56:3146-3149). In other embodiments, the alkylation is performed in an aqueous solution such as 6 M guanidinium HCl, pH 8 (Brunel et al. (2005), Chem. Commun. (20):2552-2554). In other embodiments, the alkylation is performed in DMF or dichloroethane. In another embodiment, the alkylation is performed in non-denaturing aqueous solutions, and in yet another embodiment the alkylation is performed under conditions that favor α-helical structure formation. In yet another embodiment, the alkylation is performed under conditions that favor the binding of the precursor peptidomimetic to another protein, so as to induce the formation of the bound α-helical conformation during the alkylation.

[0324] Various embodiments for X and Y are envisioned which are suitable for reacting with thiol groups. In general, each X or Y is independently selected from the general category shown in Table 5. For example, X and Y are halides such as —Cl, —Br or —I. Any of the macrocycle-forming linkers described herein may be used in any combination with any of the sequences shown and also with any of the R— substituents indicated herein.

TABLE 5
Examples of Reactive Groups Capable of Reacting
with Thiol Groups and Resulting Linkages

| X or Y | Resulting Covalent Linkage |
|---|---|
| acrylamide | Thioether |
| halide (e.g. alkyl or aryl halide) | Thioether |
| sulfonate | Thioether |
| aziridine | Thioether |
| epoxide | Thioether |
| haloacetamide | Thioether |
| maleimide | Thioether |
| sulfonate ester | Thioether |

[0325] The present invention contemplates the use of both naturally-occurring and non-naturally-occurring amino acids and amino acid analogs in the synthesis of the peptidomimetic macrocycles disclosed. Any amino acid or amino acid analog amenable to the synthetic methods employed for the synthesis of stable bis-sulfhydryl containing peptidomimetic macrocycles can be used in the present invention. For example, cysteine is contemplated as a useful amino acid in the present invention. However, sulfur-containing amino acids other than cysteine that contain a different amino acid side chain are also useful. For example, cysteine contains one methylene unit between the α-carbon of the amino acid and the terminal —SH of the amino acid side chain. The invention also contemplates the use of amino acids with multiple methylene units between the α-carbon and the terminal —SH. Non-limiting examples include α-methyl-L-homocysteine and α-methyl-D-homocysteine. In some embodiments the amino acids and amino acid analogs are of the D-configuration. In other embodiments they are of the L-configuration. In some embodiments, some of the amino acids and amino acid analogs contained in the peptidomimetic are of the D-configuration while some of the amino acids and amino acid analogs are of the L-configuration. In some embodiments the amino acid analogs are α,α-disubstituted, such as α-methyl-L-cysteine and α-methyl-D-cysteine.

[0326] The invention includes macrocycles in which macrocycle-forming linkers are used to link two or more —SH moieties in the peptidomimetic precursors to form the peptidomimetic macrocycles disclosed herein. As described above, the macrocycle-forming linkers impart conformational rigidity, increased metabolic stability and/or increased cell penetrability. Furthermore, in some embodiments, the macrocycle-forming linkages stabilize the α-helical secondary structure of the peptidomimetic macrocyles. The macrocycle-forming linkers are of the formula X-L₂-Y, wherein both X and Y are the same or different moieties, as defined above. Both X and Y have the chemical characteristics that allow one macrocycle-forming linker-L₂- to bis alkylate the bis-sulfhydryl containing peptidomimetic precursor. As defined above, the linker-L₂- includes alkylene, alkenylene, alkynylene, heteroalkylene, cycloalkylene, heterocycloalkylene, cycloarylene, or heterocycloarylene, or —R₄—K—R₄—, all of which can be optionally substituted with an R₅ group, as defined above. Furthermore, one to three carbon atoms within the macrocycle-forming linkers-L₂-, other than the carbons attached to the —SH of the sulfhydryl containing amino acid, are optionally substituted with a heteroatom such as N, S or O.

[0327] The L₂ component of the macrocycle-forming linker X-L₂-Y may be varied in length depending on, among other things, the distance between the positions of the two amino acid analogs used to form the peptidomimetic macrocycle. Furthermore, as the lengths of L₁ and/or L₃ components of the macrocycle-forming linker are varied, the length of L₂ can also be varied in order to create a linker of appropriate overall length for forming a stable peptidomimetic macrocycle. For example, if the amino acid analogs used are varied by adding an additional methylene unit to each of L₁ and L₃, the length of L₂ are decreased in length by the equivalent of approximately two methylene units to compensate for the increased lengths of L₁ and L₃.

[0328] In some embodiments, L₂ is an alkylene group of the formula —(CH₂)ₙ—, where n is an integer between about 1 and about 15. For example, n is 1, 2, 3, 4, 5, 6, 7, 8, 9 or 10. In other embodiments, L₂ is an alkenylene group. In still other embodiments, L₂ is an aryl group.

[0329] Table 6 shows additional embodiments of X-L₂-Y groups. Each X and Y in this table, is, for example, independently Cl—, Br— or I—.

TABLE 6

[chemical structure]

[chemical structure]

[chemical structure]

[chemical structure]

[chemical structure]

[chemical structure]

[chemical structure]

[chemical structure]

[chemical structure]

[chemical structure]

[chemical structure]

[chemical structure]

[chemical structure]

[chemical structure]

[chemical structure]

[chemical structure]

[chemical structure]

[chemical structure]

[chemical structure]

[chemical structure]

[chemical structure]

[chemical structure]

[chemical structure]

[chemical structure]

[chemical structure]

[chemical structure]

[chemical structure]

[chemical structure]

[chemical structure]

[chemical structure]

[chemical structure]

[chemical structure]

[chemical structure]

[chemical structure]

[chemical structure]

[chemical structure]

[chemical structure]

[chemical structure]

[chemical structure]

[chemical structure]

[chemical structure]

[chemical structure]

[chemical structure]

[chemical structure]

[chemical structure]

[chemical structure]

[chemical structure]

[chemical structure]

[chemical structure]

[0330] Additional methods of forming peptidomimetic macrocycles which are envisioned as suitable include those disclosed by Mustapa, M. Firouz Mohd et al., J. Org. Chem (2003), 68, pp. 8193-8198; Yang, Bin et al. Bioorg Med. Chem. Lett. (2004), 14, pp. 1403-1406; U.S. Pat. No. 5,364,851; U.S. Pat. No. 5,446,128; U.S. Pat. No. 5,824,483; U.S. Pat. No. 6,713,280; and U.S. Pat. No. 7,202,332. In such embodiments, aminoacid precursors are used containing an additional substituent R— at the alpha position. Such aminoacids are incorporated into the macrocycle precursor at the desired positions, which can be at the positions where the crosslinker is substituted or, alternatively, elsewhere in the sequence of the macrocycle precursor. Cyclization of the precursor is then affected according to the indicated method.

[0331] In some embodiments, the —NH moiety of the amino acid is protected using a protecting group, including without limitation -Fmoc and -Boc. In other embodiments, the amino acid is not protected prior to synthesis of the peptidomimetic macrocycle.

### Assays

[0332] The properties of the peptidomimetic macrocycles of the invention are assayed, for example, by using the methods described below. In some embodiments, a peptidomimetic macrocycle of the invention has improved biological properties relative to a corresponding polypeptide lacking the substituents described herein.

### Assay to Determine α-Helicity

[0333] In solution, the secondary structure of polypeptides with α-helical domains will reach a dynamic equilibrium between random coil structures and α-helical structures, often expressed as a “percent helicity”. Thus, for example, alpha-helical domains are predominantly random coils in solution, with α-helical content usually under 25%. Peptidomimetic macrocycles with optimized linkers, on the other hand, possess, for example, an alpha-helicity that is at least two-fold greater than that of a corresponding uncrosslinked polypeptide. In some embodiments, macrocycles will possess an alpha-helicity of greater than 50%. To assay the helicity of peptidomimetic macrocyles, the compounds are dissolved in an aqueous solution (e.g. 50 mM potassium phosphate solution at pH 7, or distilled H₂O, to concentrations of 25-50 μM). Circular dichroism (CD) spectra are obtained on a spectropolarimeter (e.g., Jasco J-710) using standard measurement parameters (e.g. temperature, 20° C.; wavelength, 190-260 nm; step resolution, 0.5 nm; speed, 20 nm/sec; accumulations, 10; response, 1 sec; bandwidth, 1 nm; path length, 0.1 cm). The α-helical content of each peptide is calculated by dividing the mean residue ellipticity (e.g. [Φ]222obs) by the reported value for a model helical decapeptide (Yang et al. (1986), Methods Enzymol. 130:208)).

### Assay to Determine Melting Temperature (Tₘ)

[0334] A peptidomimetic macrocycle of the invention comprising a secondary structure such as an α-helix exhibits, for example, a higher melting temperature than a corresponding uncrosslinked polypeptide. Typically peptidomimetic macrocycles of the invention exhibit Tₘ of >60° C. representing a highly stable structure in aqueous solutions. To assay the effect of macrocycle formation on melting temperature, peptidomimetic macrocycles or unmodified peptides are dissolved in distilled H₂O (e.g. at a final concentration of 50 μM) and the Tₘ is determined by measuring the change in ellipticity over a temperature range (e.g. 4 to 95° C.) on a spectropolarimeter (e.g., Jasco J-710) using standard parameters (e.g. wavelength 222 nm; step resolution, 0.5 nm; speed, 20 nm/sec; accumulations, 10; response, 1 sec; bandwidth, 1 nm; temperature increase rate: 1° C./min; path length, 0.1 cm).

### Protease Resistance Assay

[0335] The amide bond of the peptide backbone is susceptible to hydrolysis by proteases, thereby rendering peptidic compounds vulnerable to rapid degradation in vivo. Peptide helix formation, however, typically buries the amide backbone and therefore may shield it from proteolytic cleavage. The peptidomimetic macrocycles of the present invention may be subjected to in vitro trypsin proteolysis to assess for any change in degradation rate compared to a corresponding uncrosslinked polypeptide. For example, the peptidomimetic macrocycle and a corresponding uncrosslinked polypeptide are incubated with trypsin agarose and the reactions quenched at various time points by centrifugation and subsequent HPLC injection to quantitate the residual substrate by ultraviolet absorption at 280 nm. Briefly, the peptidomimetic macrocycle and peptidomimetic precursor (5 mcg) are incubated with trypsin agarose (Pierce) (S/E˜125) for 0, 10, 20, 90, and 180 minutes. Reactions are quenched by tabletop centrifugation at high speed; remaining substrate in the isolated supernatant is quantified by HPLC-based peak detection at 280 nm. The proteolytic reaction displays first order kinetics and the rate constant, k, is determined from a plot of ln [S] versus time (k=−1×slope).

### Ex Vivo Stability Assay

[0336] Peptidomimetic macrocycles with optimized linkers possess, for example, an ex vivo half-life that is at least two-fold greater than that of a corresponding uncrosslinked polypeptide, and possess an ex vivo half-life of 12 hours or more. For ex vivo serum stability studies, a variety of assays may be used. For example, a peptidomimetic macrocycle and a corresponding uncrosslinked polypeptide (2 mcg) are incubated with fresh mouse, rat and/or human serum (2 mL) at 37° C. for 0, 1, 2, 4, 8, and 24 hours. To determine the level of intact compound, the following procedure may be used: The samples are extracted by transferring 100 μl of sera to 2 ml centrifuge tubes followed by the addition of 10 μL of 50% formic acid and 500 μL acetonitrile and centrifugation at 14,000 RPM for 10 min at 4±2° C. The supernatants are then transferred to fresh 2 ml tubes and evaporated on Turbovap under N₂<10 psi, 37° C. The samples are reconstituted in 100 μL of 50:50 acetonitrile:water and submitted to LC-MS/MS analysis.

### In Vitro Binding Assays

[0337] To assess the binding and affinity of peptidomimetic macrocycles and peptidomimetic precursors to acceptor proteins, a fluorescence polarization assay (FPA) issued, for example. The FPA technique measures the molecular orientation and mobility using polarized light and fluorescent tracer. When excited with polarized light, fluorescent tracers (e.g., FITC) attached to molecules with high apparent molecular weights (e.g. FITC-labeled peptides bound to a large protein) emit higher levels of polarized fluorescence due to their slower rates of rotation as compared to fluorescent tracers attached to smaller molecules (e.g. FITC-labeled peptides that are free in solution).

[0338] For example, fluoresceinated peptidomimetic macrocycles (25 nM) are incubated with the acceptor protein (25-1000 nM) in binding buffer (140 mM NaCl, 50 mM Tris-HCl, pH 7.4) for 30 minutes at room temperature. Binding activity is measured, for example, by fluorescence polarization on a luminescence spectrophotometer (e.g. Perkin-Elmer LS50B). Kd values may be determined by nonlinear regression analysis using, for example, Graphpad Prism software (GraphPad Software, Inc., San Diego, Calif.). A peptidomimetic macrocycle of the invention shows, in some instances, similar or lower Kd than a corresponding uncrosslinked polypeptide.

### In Vitro Displacement Assays to Characterize Antagonists of Peptide-Protein Interactions

[0339] To assess the binding and affinity of compounds that antagonize the interaction between a peptide and an acceptor protein, a fluorescence polarization assay (FPA) utilizing a fluoresceinated peptidomimetic macrocycle derived from a peptidomimetic precursor sequence is used, for example. The FPA technique measures the molecular orientation and mobility using polarized light and fluorescent tracer. When excited with polarized light, fluorescent tracers (e.g., FITC) attached to molecules with high apparent molecular weights (e.g. FITC-labeled peptides bound to a large protein) emit higher levels of polarized fluorescence due to their slower rates of rotation as compared to fluorescent tracers attached to smaller molecules (e.g. FITC-labeled peptides that are free in solution). A compound that antagonizes the interaction between the fluoresceinated peptidomimetic macrocycle and an acceptor protein will be detected in a competitive binding FPA experiment.

[0340] For example, putative antagonist compounds (1 nM to 1 mM) and a fluoresceinated peptidomimetic macrocycle (25 nM) are incubated with the acceptor protein (50 nM) in binding buffer (140 mM NaCl, 50 mM Tris-HCl, pH 7.4) for 30 minutes at room temperature. Antagonist binding activity is measured, for example, by fluorescence polarization on a luminescence spectrophotometer (e.g. Perkin-Elmer LS50B). Kd values may be determined by nonlinear regression analysis using, for example, Graphpad Prism software (GraphPad Software, Inc., San Diego, Calif.).

[0341] Any class of molecule, such as small organic molecules, peptides, oligonucleotides or proteins can be examined as putative antagonists in this assay.

### Assay for Protein-Ligand Binding by Affinity Selection-Mass Spectrometry

[0342] To assess the binding and affinity of test compounds for proteins, an affinity-selection mass spectrometry assay is used, for example. Protein-ligand binding experiments are conducted according to the following representative procedure outlined for a system-wide control experiment using 1 μM peptidomimetic macrocycle plus 5 μM hMDM2. A 1 μL DMSO aliquot of a 40 μM stock solution of peptidomimetic macrocycle is dissolved in 19 μL of PBS (Phosphate-buffered saline: 50 mM, pH 7.5 Phosphate buffer containing 150 mM NaCl). The resulting solution is mixed by repeated pipetting and clarified by centrifugation at 10 000 g for 10 min. To a 4 μL aliquot of the resulting supernatant is added 4 μL of 10 μM hMDM2 in PBS. Each 8.0 μL experimental sample thus contains 40 pmol (1.5 μg) of protein at 5.0 μM concentration in PBS plus 1 μM peptidomimetic macrocycle and 2.5% DMSO. Duplicate samples thus prepared for each concentration point are incubated for 60 min at room temperature, and then chilled to 4° C. prior to size-exclusion chromatography-LC-MS analysis of 5.0 μL injections. Samples containing a target protein, protein-ligand complexes, and unbound compounds are injected onto an SEC column, where the complexes are separated from non-binding component by a rapid SEC step. The SEC column eluate is monitored using UV detectors to confirm that the early-eluting protein fraction, which elutes in the void volume of the SEC column, is well resolved from unbound components that are retained on the column. After the peak containing the protein and protein-ligand complexes elutes from the primary UV detector, it enters a sample loop where it is excised from the flow stream of the SEC stage and transferred directly to the LC-MS via a valving mechanism. The (M+3H)³⁺ ion of the peptidomimetic macrocycle is observed by ESI-MS at the expected m/z, confirming the detection of the protein-ligand complex.

### Assay for Protein-Ligand Kd Titration Experiments

[0343] To assess the binding and affinity of test compounds for proteins, a protein-ligand K_{d} titration experiment is performed, for example. Protein-ligand K_{d} titrations experiments are conducted as follows: 2 μL DMSO aliquots of a serially diluted stock solution of titrant peptidomimetic macrocycle (5, 2.5, . . . , 0.098 mM) are prepared then dissolved in 38 μL of PBS. The resulting solutions are mixed by repeated pipetting and clarified by centrifugation at 10 000 g for 10 min. To 4.0 μL aliquots of the resulting supernatants is added 4.0 μL of 10 μM hMDM2 in PBS. Each 8.0 μL experimental sample thus contains 40 pmol (1.5 μg) of protein at 5.0 μM concentration in PBS, varying concentrations (125, 62.5, . . . , 0.24 μM) of the titrant peptide, and 2.5% DMSO. Duplicate samples thus prepared for each concentration point are incubated at room temperature for 30 min, then chilled to 4° C. prior to SEC-LC-MS analysis of 2.0 μL injections. The (M+H)¹⁺, (M+2H)²⁺, (M+3H)³⁺, and/or (M+Na)¹⁺ ion is observed by ESI-MS; extracted ion chromatograms are quantified, then fit to equations to derive the binding affinity K_{d} as described in “A General Technique to Rank Protein-Ligand Binding Affinities and Determine Allosteric vs. Direct Binding Site Competition in Compound Mixtures.” Annis, D. A.; Nazef, N.; Chuang, C. C.; Scott, M. P.; Nash, H. M. J. Am. Chem. Soc. 2004, 126, 15495-15503; also in “ALIS: An Affinity Selection-Mass Spectrometry System for the Discovery and Characterization of Protein-Ligand Interactions” D. A. Annis, C.-C. Chuang, and N. Nazef. In Mass Spectrometry in Medicinal Chemistry. Edited by Wanner K, Höfner G: Wiley-VCH; 2007:121-184. Mannhold R, Kubinyi H, Folkers G (Series Editors): Methods and Principles in Medicinal Chemistry.

### Assay for Competitive Binding Experiments by Affinity Selection-Mass Spectrometry

[0344] To determine the ability of test compounds to bind competitively to proteins, an affinity selection mass spectrometry assay is performed, for example. A mixture of ligands at 40 μM per component is prepared by combining 2 μL aliquots of 400 μM stocks of each of the three compounds with 14 μL of DMSO. Then, 1 μL aliquots of this 40 μM per component mixture are combined with 1 μL DMSO aliquots of a serially diluted stock solution of titrant peptidomimetic macrocycle (10, 5, 2.5, . . . , 0.078 mM). These 2 μL samples are dissolved in 38 μL of PBS. The resulting solutions were mixed by repeated pipetting and clarified by centrifugation at 10 000 g for 10 min. To 4.0 μL aliquots of the resulting supernatants is added 4.0 μL of 10 μM hMDM2 in PBS. Each 8.0 μL experimental sample thus contains 40 pmol (1.5 μg) of protein at 5.0 μM concentration in PBS plus 0.5 μM ligand, 2.5% DMSO, and varying concentrations (125, 62.5, . . . , 0.98 μM) of the titrant peptidomimetic macrocycle. Duplicate samples thus prepared for each concentration point are incubated at room temperature for 60 min, then chilled to 4° C. prior to SEC-LC-MS analysis of 2.0 μL injections. Additional details on these and other methods are provided in “A General Technique to Rank Protein-Ligand Binding Affinities and Determine Allosteric vs. Direct Binding Site Competition in Compound Mixtures.” Annis, D. A.; Nazef, N.; Chuang, C. C.; Scott, M. P.; Nash, H. M. J. Am. Chem. Soc. 2004, 126, 15495-15503; also in “ALIS: An Affinity Selection-Mass Spectrometry System for the Discovery and Characterization of Protein-Ligand Interactions” D. A. Annis, C.-C. Chuang, and N. Nazef. In Mass Spectrometry in Medicinal Chemistry. Edited by Wanner K, Höfner G: Wiley-VCH; 2007:121-184. Mannhold R, Kubinyi H, Folkers G (Series Editors): Methods and Principles in Medicinal Chemistry.

### Binding Assays in Intact Cells

[0345] It is possible to measure binding of peptides or peptidomimetic macrocycles to their natural acceptors in intact cells by immunoprecipitation experiments. For example, intact cells are incubated with fluoresceinated (FITC-labeled) compounds for 4 hrs in the absence of serum, followed by serum replacement and further incubation that ranges from 4-18 hrs. Cells are then pelleted and incubated in lysis buffer (50 mM Tris [pH 7.6], 150 mM NaCl, 1% CHAPS and protease inhibitor cocktail) for 10 minutes at 4° C. Extracts are centrifuged at 14,000 rpm for 15 minutes and supernatants collected and incubated with 10 μl goat anti-FITC antibody for 2 hrs, rotating at 4° C. followed by further 2 hrs incubation at 4° C. with protein A/G Sepharose (50 μl of 50% bead slurry). After quick centrifugation, the pellets are washed in lysis buffer containing increasing salt concentration (e.g., 150, 300, 500 mM). The beads are then re-equilibrated at 150 mM NaCl before addition of SDS-containing sample buffer and boiling. After centrifugation, the supernatants are optionally electrophoresed using 4%-12% gradient Bis-Tris gels followed by transfer into Immobilon-P membranes. After blocking, blots are optionally incubated with an antibody that detects FITC and also with one or more antibodies that detect proteins that bind to the peptidomimetic macrocycle.

### Cellular Penetrability Assays

[0346] A peptidomimetic macrocycle is, for example, more cell penetrable compared to a corresponding uncrosslinked macrocycle. Peptidomimetic macrocycles with optimized linkers possess, for example, cell penetrability that is at least two-fold greater than a corresponding uncrosslinked macrocycle, and often 20% or more of the applied peptidomimetic macrocycle will be observed to have penetrated the cell after 4 hours. To measure the cell penetrability of peptidomimetic macrocycles and corresponding uncrosslinked macrocycle, intact cells are incubated with fluoresceinated peptidomimetic macrocycles or corresponding uncrosslinked macrocycle (10 μM) for 4 hrs in serum free media at 37° C., washed twice with media and incubated with trypsin (0.25%) for 10 min at 37° C. The cells are washed again and resuspended in PBS. Cellular fluorescence is analyzed, for example, by using either a FACSCalibur flow cytometer or Cellomics' KineticScan® HCS Reader.

### Cellular Efficacy Assays

[0347] The efficacy of certain peptidomimetic macrocycles is determined, for example, in cell-based killing assays using a variety of tumorigenic and non-tumorigenic cell lines and primary cells derived from human or mouse cell populations. Cell viability is monitored, for example, over 24-96 hrs of incubation with peptidomimetic macrocycles (0.5 to 50 μM) to identify those that kill at EC₅₀<10 μM. Several standard assays that measure cell viability are commercially available and are optionally used to assess the efficacy of the peptidomimetic macrocycles. In addition, assays that measure Annexin V and caspase activation are optionally used to assess whether the peptidomimetic macrocycles kill cells by activating the apoptotic machinery. For example, the Cell Titer-glo assay is used which determines cell viability as a function of intracellular ATP concentration.

### In Vivo Stability Assay

[0348] To investigate the in vivo stability of the peptidomimetic macrocycles, the compounds are, for example, administered to mice and/or rats by IV, IP, PO or inhalation routes at concentrations ranging from 0.1 to 50 mg/kg and blood specimens withdrawn at 0′, 5′, 15′, 30′, 1 hr, 4 hrs, 8 hrs and 24 hours post-injection. Levels of intact compound in 25 μL of fresh serum are then measured by LC-MS/MS as above.

### In Vivo Efficacy in Animal Models

[0349] To determine the anti-oncogenic activity of peptidomimetic macrocycles of the invention in vivo, the compounds are, for example, given alone (IP, IV, PO, by inhalation or nasal routes) or in combination with sub-optimal doses of relevant chemotherapy (e.g., cyclophosphamide, doxorubicin, etoposide). In one example, 5×10⁶ RS4;11 cells (established from the bone marrow of a patient with acute lymphoblastic leukemia) that stably express luciferase are injected by tail vein in NOD-SCID mice 3 hrs after they have been subjected to total body irradiation. If left untreated, this form of leukemia is fatal in 3 weeks in this model. The leukemia is readily monitored, for example, by injecting the mice with D-luciferin (60 mg/kg) and imaging the anesthetized animals (e.g., Xenogen In Vivo Imaging System, Caliper Life Sciences, Hopkinton, Mass.). Total body bioluminescence is quantified by integration of photonic flux (photons/sec) by Living Image Software (Caliper Life Sciences, Hopkinton, Mass.). Peptidomimetic macrocycles alone or in combination with sub-optimal doses of relevant chemotherapeutics agents are, for example, administered to leukemic mice (10 days after injection/day 1 of experiment, in bioluminescence range of 14-16) by tail vein or IP routes at doses ranging from 0.1 mg/kg to 50 mg/kg for 7 to 21 days. Optionally, the mice are imaged throughout the experiment every other day and survival monitored daily for the duration of the experiment. Expired mice are optionally subjected to necropsy at the end of the experiment. Another animal model is implantation into NOD-SCID mice of DoHH2, a cell line derived from human follicular lymphoma that stably expresses luciferase. These in vivo tests optionally generate preliminary pharmacokinetic, pharmacodynamic and toxicology data.

### Clinical Trials

[0350] To determine the suitability of the peptidomimetic macrocycles of the invention for treatment of humans, clinical trials are performed. For example, patients diagnosed with cancer and in need of treatment are selected and separated in treatment and one or more control groups, wherein the treatment group is administered a peptidomimetic macrocycle of the invention, while the control groups receive a placebo or a known anti-cancer drug. The treatment safety and efficacy of the peptidomimetic macrocycles of the invention can thus be evaluated by performing comparisons of the patient groups with respect to factors such as survival and quality-of-life. In this example, the patient group treated with a peptidomimetic macrocyle show improved long-term survival compared to a patient control group treated with a placebo.

### Pharmaceutical Compositions and Routes of Administration

[0351] The peptidomimetic macrocycles of the invention also include pharmaceutically acceptable derivatives or prodrugs thereof. A “pharmaceutically acceptable derivative” means any pharmaceutically acceptable salt, ester, salt of an ester, pro-drug or other derivative of a compound of this invention which, upon administration to a recipient, is capable of providing (directly or indirectly) a compound of this invention. Particularly favored pharmaceutically acceptable derivatives are those that increase the bioavailability of the compounds of the invention when administered to a mammal (e.g., by increasing absorption into the blood of an orally administered compound) or which increases delivery of the active compound to a biological compartment (e.g., the brain or lymphatic system) relative to the parent species. Some pharmaceutically acceptable derivatives include a chemical group which increases aqueous solubility or active transport across the gastrointestinal mucosa.

[0352] In some embodiments, the peptidomimetic macrocycles of the invention are modified by covalently or non-covalently joining appropriate functional groups to enhance selective biological properties. Such modifications include those which increase biological penetration into a given biological compartment (e.g., blood, lymphatic system, central nervous system), increase oral availability, increase solubility to allow administration by injection, alter metabolism, and alter rate of excretion.

[0353] Pharmaceutically acceptable salts of the compounds of this invention include those derived from pharmaceutically acceptable inorganic and organic acids and bases. Examples of suitable acid salts include acetate, adipate, benzoate, benzenesulfonate, butyrate, citrate, digluconate, dodecylsulfate, formate, fumarate, glycolate, hemisulfate, heptanoate, hexanoate, hydrochloride, hydrobromide, hydroiodide, lactate, maleate, malonate, methanesulfonate, 2-naphthalenesulfonate, nicotinate, nitrate, palmoate, phosphate, picrate, pivalate, propionate, salicylate, succinate, sulfate, tartrate, tosylate and undecanoate. Salts derived from appropriate bases include alkali metal (e.g., sodium), alkaline earth metal (e.g., magnesium), ammonium and N-(alkyl)₄⁺ salts.

[0354] For preparing pharmaceutical compositions from the compounds of the present invention, pharmaceutically acceptable carriers include either solid or liquid carriers. Solid form preparations include powders, tablets, pills, capsules, cachets, suppositories, and dispersible granules. A solid carrier can be one or more substances, which also acts as diluents, flavoring agents, binders, preservatives, tablet disintegrating agents, or an encapsulating material. Details on techniques for formulation and administration are well described in the scientific and patent literature, see, e.g., the latest edition of Remington's Pharmaceutical Sciences, Maack Publishing Co, Easton Pa.

[0355] In powders, the carrier is a finely divided solid, which is in a mixture with the finely divided active component. In tablets, the active component is mixed with the carrier having the necessary binding properties in suitable proportions and compacted in the shape and size desired.

[0356] Suitable solid excipients are carbohydrate or protein fillers include, but are not limited to sugars, including lactose, sucrose, mannitol, or sorbitol; starch from corn, wheat, rice, potato, or other plants; cellulose such as methyl cellulose, hydroxypropylmethyl-cellulose, or sodium carboxymethylcellulose; and gums including arabic and tragacanth; as well as proteins such as gelatin and collagen. If desired, disintegrating or solubilizing agents are added, such as the cross-linked polyvinyl pyrrolidone, agar, alginic acid, or a salt thereof, such as sodium alginate.

[0357] Liquid form preparations include solutions, suspensions, and emulsions, for example, water or water/propylene glycol solutions. For parenteral injection, liquid preparations can be formulated in solution in aqueous polyethylene glycol solution.

[0358] The pharmaceutical preparation is preferably in unit dosage form. In such form the preparation is subdivided into unit doses containing appropriate quantities of the active component. The unit dosage form can be a packaged preparation, the package containing discrete quantities of preparation, such as packeted tablets, capsules, and powders in vials or ampoules. Also, the unit dosage form can be a capsule, tablet, cachet, or lozenge itself, or it can be the appropriate number of any of these in packaged form.

[0359] When the compositions of this invention comprise a combination of a peptidomimetic macrocycle and one or more additional therapeutic or prophylactic agents, both the compound and the additional agent should be present at dosage levels of between about 1 to 100%, and more preferably between about 5 to 95% of the dosage normally administered in a monotherapy regimen. In some embodiments, the additional agents are administered separately, as part of a multiple dose regimen, from the compounds of this invention. Alternatively, those agents are part of a single dosage form, mixed together with the compounds of this invention in a single composition.

### Methods of Use

[0360] In one aspect, the present invention provides novel peptidomimetic macrocycles that are useful in competitive binding assays to identify agents which bind to the natural ligand(s) of the proteins or peptides upon which the peptidomimetic macrocycles are modeled. For example, in the p53/HDMX system, labeled peptidomimetic macrocycles based on p53 can be used in a HDMX binding assay along with small molecules that competitively bind to HDMX. Competitive binding studies allow for rapid in vitro evaluation and determination of drug candidates specific for the p53/HDMX system. Such binding studies may be performed with any of the peptidomimetic macrocycles disclosed herein and their binding partners.

[0361] Further provided are methods for the generation of antibodies against the peptidomimetic macrocycles. In some embodiments, these antibodies specifically bind both the peptidomimetic macrocycle and the precursor peptides, such as p53, to which the peptidomimetic macrocycles are related. Such antibodies, for example, disrupt the native protein-protein interaction, for example, binding between p53 and HDMX.

[0362] In other aspects, the present invention provides for both prophylactic and therapeutic methods of treating a subject at risk of (or susceptible to) a disorder or having a disorder associated with aberrant (e.g., insufficient or excessive) expression or activity of the molecules including p53, HDM2 or HDMX.

[0363] In another embodiment, a disorder is caused, at least in part, by an abnormal level of p53 or HDM2 or HDMX, (e.g., over or under expression), or by the presence of p53 or HDM2 or HDMX exhibiting abnormal activity. As such, the reduction in the level and/or activity of p53 or HDM2 or HDMX, or the enhancement of the level and/or activity of p53 or HDM2 or HDMX, by peptidomimetic macrocycles derived from p53, is used, for example, to ameliorate or reduce the adverse symptoms of the disorder.

[0364] In another aspect, the present invention provides methods for treating or preventing a disease including hyperproliferative disease and inflammatory disorder by interfering with the interaction or binding between binding partners, for example, between p53 and HDM2 or p53 and HDMX. These methods comprise administering an effective amount of a compound of the invention to a warm blooded animal, including a human. In some embodiments, the administration of the compounds of the present invention induces cell growth arrest or apoptosis.

[0365] As used herein, the term “treatment” is defined as the application or administration of a therapeutic agent to a patient, or application or administration of a therapeutic agent to an isolated tissue or cell line from a patient, who has a disease, a symptom of disease or a predisposition toward a disease, with the purpose to cure, heal, alleviate, relieve, alter, remedy, ameliorate, improve or affect the disease, the symptoms of disease or the predisposition toward disease.

[0366] In some embodiments, the peptidomimetics macrocycles of the invention is used to treat, prevent, and/or diagnose cancers and neoplastic conditions. As used herein, the terms “cancer”, “hyperproliferative” and “neoplastic” refer to cells having the capacity for autonomous growth, i.e., an abnormal state or condition characterized by rapidly proliferating cell growth. Hyperproliferative and neoplastic disease states may be categorized as pathologic, i.e., characterizing or constituting a disease state, or may be categorized as non-pathologic, i.e., a deviation from normal but not associated with a disease state. The term is meant to include all types of cancerous growths or oncogenic processes, metastatic tissues or malignantly transformed cells, tissues, or organs, irrespective of histopathologic type or stage of invasiveness. A metastatic tumor can arise from a multitude of primary tumor types, including but not limited to those of breast, lung, liver, colon and ovarian origin. “Pathologic hyperproliferative” cells occur in disease states characterized by malignant tumor growth. Examples of non-pathologic hyperproliferative cells include proliferation of cells associated with wound repair. Examples of cellular proliferative and/or differentiative disorders include cancer, e.g., carcinoma, sarcoma, or metastatic disorders. In some embodiments, the peptidomimetics macrocycles are novel therapeutic agents for controlling breast cancer, ovarian cancer, colon cancer, lung cancer, metastasis of such cancers and the like.

[0367] Examples of cancers or neoplastic conditions include, but are not limited to, a fibrosarcoma, myosarcoma, liposarcoma, chondrosarcoma, osteogenic sarcoma, chordoma, angio sarcoma, endotheliosarcoma, lymphangiosarcoma, lymphangioendothelio sarcoma, synovioma, mesothelioma, Ewing's tumor, leiomyosarcoma, rhabdomyosarcoma, gastric cancer, esophageal cancer, rectal cancer, pancreatic cancer, ovarian cancer, prostate cancer, uterine cancer, cancer of the head and neck, lung cancer, breast cancer, skin cancer, melanoma, brain cancer, squamous cell carcinoma, sebaceous gland carcinoma, papillary carcinoma, papillary adenocarcinoma, cystadenocarcinoma, medullary carcinoma, bronchogenic carcinoma, renal cell carcinoma, hepatoma, bile duct carcinoma, choriocarcinoma, seminoma, embryonal carcinoma, Wilm's tumor, cervical cancer, testicular cancer, small cell lung carcinoma, non-small cell lung carcinoma, bladder carcinoma, epithelial carcinoma, glioma, astrocytoma, medulloblastoma, craniopharyngioma, ependymoma, pinealoma, hemangioblastoma, acoustic neuroma, oligodendroglioma, meningioma, neuroblastoma, retinoblastoma, leukemia, lymphoma, or Kaposi sarcoma.

[0368] Examples of proliferative disorders include hematopoietic neoplastic disorders. As used herein, the term “hematopoietic neoplastic disorders” includes diseases involving hyperplastic/neoplastic cells of hematopoietic origin, e.g., arising from myeloid, lymphoid or erythroid lineages, or precursor cells thereof. Preferably, the diseases arise from poorly differentiated acute leukemias, e.g., erythroblastic leukemia and acute megakaryoblastic leukemia. Additional exemplary myeloid disorders include, but are not limited to, acute promyeloid leukemia (APML), acute myelogenous leukemia (AML) and chronic myelogenous leukemia (CML) (reviewed in Vaickus (1991), Crit Rev. Oncol./Hemotol. 11:267-97); lymphoid malignancies include, but are not limited to acute lymphoblastic leukemia (ALL) which includes B-lineage ALL and T-lineage ALL, chronic lymphocytic leukemia (CLL), prolymphocytic leukemia (PLL), hairy cell leukemia (HLL) and Waldenstrom's macroglobulinemia (WM). Additional forms of malignant lymphomas include, but are not limited to non-Hodgkin lymphoma and variants thereof, peripheral T cell lymphomas, adult T cell leukemia/lymphoma (ATL), cutaneous T-cell lymphoma (CTCL), large granular lymphocytic leukemia (LGF), Hodgkin's disease and Reed-Stemberg disease.

[0369] Examples of cellular proliferative and/or differentiative disorders of the breast include, but are not limited to, proliferative breast disease including, e.g., epithelial hyperplasia, sclerosing adenosis, and small duct papillomas; tumors, e.g., stromal tumors such as fibroadenoma, phyllodes tumor, and sarcomas, and epithelial tumors such as large duct papilloma; carcinoma of the breast including in situ (noninvasive) carcinoma that includes ductal carcinoma in situ (including Paget's disease) and lobular carcinoma in situ, and invasive (infiltrating) carcinoma including, but not limited to, invasive ductal carcinoma, invasive lobular carcinoma, medullary carcinoma, colloid (mucinous) carcinoma, tubular carcinoma, and invasive papillary carcinoma, and miscellaneous malignant neoplasms. Disorders in the male breast include, but are not limited to, gynecomastia and carcinoma.

[0370] Examples of cellular proliferative and/or differentiative disorders of the skin include, but are not limited to proliferative skin disease such as melanomas, including mucosal melanoma, superficial spreading melanoma, nodular melanoma, lentigo (e.g. lentigo maligna, lentigo maligna melanoma, or acral lentiginous melanoma), amelanotic melanoma, desmoplastic melanoma, melanoma with features of a Spitz nevus, melanoma with small nevus-like cells, polypoid melanoma, and soft-tissue melanoma; basal cell carcinomas including micronodular basal cell carcinoma, superficial basal cell carcinoma, nodular basal cell carcinoma (rodent ulcer), cystic basal cell carcinoma, cicatricial basal cell carcinoma, pigmented basal cell carcinoma, aberrant basal cell carcinoma, infiltrative basal cell carcinoma, nevoid basal cell carcinoma syndrome, polypoid basal cell carcinoma, pore-like basal cell carcinoma, and fibroepithelioma of Pinkus; squamus cell carcinomas including acanthoma (large cell acanthoma), adenoid squamous cell carcinoma, basaloid squamous cell carcinoma, clear cell squamous cell carcinoma, signet-ring cell squamous cell carcinoma, spindle cell squamous cell carcinoma, Marjolin's ulcer, erythroplasia of Queyrat, and Bowen's disease; or other skin or subcutaneous tumors.

[0371] Examples of cellular proliferative and/or differentiative disorders of the lung include, but are not limited to, bronchogenic carcinoma, including paraneoplastic syndromes, bronchioloalveolar carcinoma, neuroendocrine tumors, such as bronchial carcinoid, miscellaneous tumors, and metastatic tumors; pathologies of the pleura, including inflammatory pleural effusions, noninflammatory pleural effusions, pneumothorax, and pleural tumors, including solitary fibrous tumors (pleural fibroma) and malignant mesothelioma.

[0372] Examples of cellular proliferative and/or differentiative disorders of the colon include, but are not limited to, non-neoplastic polyps, adenomas, familial syndromes, colorectal carcinogenesis, colorectal carcinoma, and carcinoid tumors.

[0373] Examples of cellular proliferative and/or differentiative disorders of the liver include, but are not limited to, nodular hyperplasias, adenomas, and malignant tumors, including primary carcinoma of the liver and metastatic tumors.

[0374] Examples of cellular proliferative and/or differentiative disorders of the ovary include, but are not limited to, ovarian tumors such as, tumors of coelomic epithelium, serous tumors, mucinous tumors, endometrioid tumors, clear cell adenocarcinoma, cystadenofibroma, Brenner tumor, surface epithelial tumors; germ cell tumors such as mature (benign) teratomas, monodermal teratomas, immature malignant teratomas, dysgerminoma, endodermal sinus tumor, choriocarcinoma; sex cord-stomal tumors such as, granulosa-theca cell tumors, thecomafibromas, androblastomas, hill cell tumors, and gonadoblastoma; and metastatic tumors such as Krukenberg tumors.

[0375] In other or further embodiments, the peptidomimetics macrocycles described herein are used to treat, prevent or diagnose conditions characterized by overactive cell death or cellular death due to physiologic insult, etc. Some examples of conditions characterized by premature or unwanted cell death are or alternatively unwanted or excessive cellular proliferation include, but are not limited to hypocellular/hypoplastic, acellular/aplastic, or hypercellular/hyperplastic conditions. Some examples include hematologic disorders including but not limited to fanconi anemia, aplastic anemia, thalaessemia, congenital neutropenia, and myelodysplasia.

[0376] In other or further embodiments, the peptidomimetics macrocycles of the invention that act to decrease apoptosis are used to treat disorders associated with an undesirable level of cell death. Thus, in some embodiments, the anti-apoptotic peptidomimetics macrocycles of the invention are used to treat disorders such as those that lead to cell death associated with viral infection, e.g., infection associated with infection with human immunodeficiency virus (HIV). A wide variety of neurological diseases are characterized by the gradual loss of specific sets of neurons. One example is Alzheimer's disease (AD). Alzheimer's disease is characterized by loss of neurons and synapses in the cerebral cortex and certain subcortical regions. This loss results in gross atrophy of the affected regions. Both amyloid plaques and neurofibrillary tangles are visible in brains of those afflicted by AD. Alzheimer's disease has been identified as a protein misfolding disease, due to the accumulation of abnormally folded A-beta and tau proteins in the brain. Plaques are made up of β-amyloid. β-amyloid is a fragment from a larger protein called amyloid precursor protein (APP). APP is critical to neuron growth, survival and post-injury repair. In AD, an unknown process causes APP to be cleaved into smaller fragments by enzymes through proteolysis. One of these fragments is fibrils of β-amyloid, which form clumps that deposit outside neurons in dense formations known as senile plaques. Plaques continue to grow into insoluble twisted fibers within the nerve cell, often called tangles. Disruption of the interaction between β-amyloid and its native receptor is therefore important in the treatment of AD. The anti-apoptotic peptidomimetics macrocycles of the invention are used, in some embodiments, in the treatment of AD and other neurological disorders associated with cell apoptosis. Such neurological disorders include Alzheimer's disease, Parkinson's disease, amyotrophic lateral sclerosis (ALS) retinitis pigmentosa, spinal muscular atrophy, and various forms of cerebellar degeneration. The cell loss in these diseases does not induce an inflammatory response, and apoptosis appears to be the mechanism of cell death.

[0377] In addition, a number of hematologic diseases are associated with a decreased production of blood cells. These disorders include anemia associated with chronic disease, aplastic anemia, chronic neutropenia, and the myelodysplastic syndromes. Disorders of blood cell production, such as myelodysplastic syndrome and some forms of aplastic anemia, are associated with increased apoptotic cell death within the bone marrow. These disorders could result from the activation of genes that promote apoptosis, acquired deficiencies in stromal cells or hematopoietic survival factors, or the direct effects of toxins and mediators of immune responses. Two common disorders associated with cell death are myocardial infarctions and stroke. In both disorders, cells within the central area of ischemia, which is produced in the event of acute loss of blood flow, appear to die rapidly as a result of necrosis. However, outside the central ischemic zone, cells die over a more protracted time period and morphologically appear to die by apoptosis. In other or further embodiments, the anti-apoptotic peptidomimetics macrocycles of the invention are used to treat all such disorders associated with undesirable cell death.

[0378] Some examples of neurologic disorders that are treated with the peptidomimetics macrocycles described herein include but are not limited to Alzheimer's Disease, Down's Syndrome, Dutch Type Hereditary Cerebral Hemorrhage Amyloidosis, Reactive Amyloidosis, Familial Amyloid Nephropathy with Urticaria and Deafness, Muckle-Wells Syndrome, Idiopathic Myeloma; Macroglobulinemia-Associated Myeloma, Familial Amyloid Polyneuropathy, Familial Amyloid Cardiomyopathy, Isolated Cardiac Amyloid, Systemic Senile Amyloidosis, Adult Onset Diabetes, Insulinoma, Isolated Atrial Amyloid, Medullary Carcinoma of the Thyroid, Familial Amyloidosis, Hereditary Cerebral Hemorrhage With Amyloidosis, Familial Amyloidotic Polyneuropathy, Scrapie, Creutzfeldt-Jacob Disease, Gerstmann Straussler-Scheinker Syndrome, Bovine Spongiform Encephalitis, a prion-mediated disease, and Huntington's Disease.

[0379] In another embodiment, the peptidomimetics macrocycles described herein are used to treat, prevent or diagnose inflammatory disorders. Numerous types of inflammatory disorders exist. Certain inflammatory diseases are associated with the immune system, for example, autoimmune diseases. Autoimmune diseases arise from an overactive immune response of the body against substances and tissues normally present in the body, i.e. self antigens. In other words, the immune system attacks its own cells. Autoimmune diseases are a major cause of immune-mediated diseases. Rheumatoid arthritis is an example of an autoimmune disease, in which the immune system attacks the joints, where it causes inflammation (i.e. arthritis) and destruction. It can also damage some organs, such as the lungs and skin. Rheumatoid arthritis can lead to substantial loss of functioning and mobility. Rheumatoid arthritis is diagnosed with blood tests especially the rheumatoid factor test. Some examples of autoimmune diseases that are treated with the peptidomimetics macrocycles described herein include, but are not limited to, acute disseminated encephalomyelitis (ADEM), Addison's disease, ankylosing spondylitis, antiphospholipid antibody syndrome (APS), autoimmune hemolytic anemia, autoimmune hepatitis, autoimmune inner ear disease, Bechet's disease, bullous pemphigoid, coeliac disease, Chagas disease, Churg-Strauss syndrome, chronic obstructive pulmonary disease (COPD), Crohn's disease, dermatomyositis, diabetes mellitus type 1, endometriosis, Goodpasture's syndrome, Graves' disease, Guillain-Barré syndrome (GBS), Hashimoto's disease, Hidradenitis suppurativa, idiopathic thrombocytopenic purpura, inflammatory bowl disease (IBD), interstitial cystitis, lupus erythematosus, morphea, multiple sclerosis, myasthenia gravis, narcolepsy, neuromyotonia, pemphigus vulgaris, pernicious anaemia, Polymyositis, polymyalgia rheumatica, primary biliary cirrhosis, psoriasis, rheumatoid arthritis, schizophrenia, scleroderma, Sjögren's syndrome, temporal arteritis (also known as “giant cell arteritis”), Takayasu's arteritis, Vasculitis, Vitiligo, and Wegener's granulomatosis.

[0380] Some examples of other types of inflammatory disorders that are treated with the peptidomimetics macrocycles described herein include, but are not limited to, allergy including allergic rhinitis/sinusitis, skin allergies (urticaria/hives, angioedema, atopic dermatitis), food allergies, drug allergies, insect allergies, and rare allergic disorders such as mastocytosis, asthma, arthritis including osteoarthritis, rheumatoid arthritis, and spondyloarthropathies, primary angitis of the CNS, sarcoidosis, organ transplant rejection, fibromyalgia, fibrosis, pancreatitis, and pelvic inflammatory disease.

[0381] Examples of cardiovascular disorders (e.g., inflammatory disorders) that are treated or prevented with the peptidomimetics macrocycles of the invention include, but are not limited to, aortic valve stenosis, atherosclerosis, myocardial infarction, stroke, thrombosis, aneurism, heart failure, ischemic heart disease, angina pectoris, sudden cardiac death, hypertensive heart disease; non-coronary vessel disease, such as arteriolosclerosis, small vessel disease, nephropathy, hypertriglyceridemia, hypercholesterolemia, hyperlipidemia, xanthomatosis, asthma, hypertension, emphysema and chronic pulmonary disease; or a cardiovascular condition associated with interventional procedures (“procedural vascular trauma”), such as restenosis following angioplasty, placement of a shunt, stent, synthetic or natural excision grafts, indwelling catheter, valve or other implantable devices. Preferred cardiovascular disorders include atherosclerosis, myocardial infarction, aneurism, and stroke.

[0382] While preferred embodiments of the present invention have been shown and described herein, it will be obvious to those skilled in the art that such embodiments are provided by way of example only. Numerous variations, changes, and substitutions will now occur to those skilled in the art without departing from the invention. It should be understood that various alternatives to the embodiments of the invention described herein may be employed in practicing the invention. It is intended that the following claims define the scope of the invention and that methods and structures within the scope of these claims and their equivalents be covered thereby.

### Formulation and Administration

### Mode of Administration

[0383] An effective amount of a peptidomimetic macrocycles of the disclosure can be administered in either single or multiple doses by any of the accepted modes of administration. In some embodiments, the peptidomimetic macrocycles of the disclosure are administered parenterally, for example, by subcutaneous, intramuscular, intrathecal, intravenous or epidural injection. For example, the peptidomimetic macrocycle is administered intravenously, intraarterially, subcutaneously or by infusion. In some examples, the peptidomimetic macrocycle is administered intravenously. In some examples, the peptidomimetic macrocycle is administered intraarterially.

[0384] Regardless of the route of administration selected, the peptidomimetic macrocycles of the present disclosure, and/or the pharmaceutical compositions of the present disclosure, are formulated into pharmaceutically-acceptable dosage forms. The peptidomimetic macrocycles according to the disclosure can be formulated for administration in any convenient way for use in human or veterinary medicine, by analogy with other pharmaceuticals.

[0385] In one aspect, the disclosure provides pharmaceutical formulation comprising a therapeutically-effective amount of one or more of the peptidomimetic macrocycles described above, formulated together with one or more pharmaceutically acceptable carriers (additives) and/or diluents. In one embodiment, one or more of the peptidomimetic macrocycles described herein are formulated for parenteral administration for parenteral administration, one or more peptidomimetic macrocycles disclosed herein can be formulated as aqueous or nonaqueous solutions, dispersions, suspensions or emulsions or sterile powders which can be reconstituted into sterile injectable solutions or dispersions just prior to use. Such formulations can comprise sugars, alcohols, antioxidants, buffers, bacteriostats, solutes which render the formulation isotonic with the blood of the intended recipient or suspending or thickening agents. These compositions can also contain adjuvants such as preservatives, wetting agents, emulsifying agents and dispersing agents. Prevention of the action of microorganisms upon the subject compounds can be ensured by the inclusion of various antibacterial and antifungal agents, for example, paraben, chlorobutanol, phenol sorbic acid, and the like. It can also be desirable to include isotonic agents, such as sugars, sodium chloride, and the like into the compositions. In addition, prolonged absorption of the injectable pharmaceutical form can be brought about by the inclusion of agents which delay absorption such as aluminum monostearate and gelatin. If desired the formulation can be diluted prior to use with, for example, an isotonic saline solution or a dextrose solution. In some examples, the peptidomimetic macrocycle is formulated as an aqueous solution and is administered intravenously.

### Amount and Frequency of Administration

[0386] Dosing can be determined using various techniques. The selected dosage level can depend upon a variety of factors including the activity of the particular peptidomimetic macrocycle employed, the route of administration, the time of administration, the rate of excretion or metabolism of the particular peptidomimetic macrocycle being employed, the duration of the treatment, other drugs, compounds and/or materials used in combination with the particular peptidomimetic macrocycle employed, the age, sex, weight, condition, general health and prior medical history of the patient being treated, and like factors well known in the medical arts. The dosage values can also vary with the severity of the condition to be alleviated. For any particular subject, specific dosage regimens can be adjusted over time according to the individual need and the professional judgment of the person administering or supervising the administration of the compositions.

[0387] A physician or veterinarian can prescribe the effective amount of the pharmaceutical composition required. For example, the physician or veterinarian could start doses of the compounds of the disclosure employed in the pharmaceutical composition at levels lower than that required in order to achieve the desired therapeutic effect and gradually increase the dosage until the desired effect is achieved.

[0388] In some embodiments, a suitable daily dose of a peptidomimetic macrocycle of the disclosure can be that amount of the peptidomimetic macrocycle which is the lowest dose effective to produce a therapeutic effect. Such an effective dose will generally depend upon the factors described above. The precise time of administration and amount of any particular peptidomimetic macrocycle that will yield the most effective treatment in a given patient will depend upon the activity, pharmacokinetics, and bioavailability of a particular peptidomimetic macrocycle, physiological condition of the patient (including age, sex, disease type and stage, general physical condition, responsiveness to a given dosage and type of medication), route of administration, and the like.

[0389] Dosage can be based on the amount of the peptidomimetic macrocycle per kg body weight of the patient. Alternatively, the dosage of the subject disclosure can be determined by reference to the plasma concentrations of the peptidomimetic macrocycle. For example, the maximum plasma concentration (Cmax) and the area under the plasma concentration-time curve from time 0 to infinity (AUC) can be used.

[0390] In some embodiments, the subject is a human subject and the amount of the peptidomimetic macrocycle administered is 0.01-100 mg per kilogram body weight of the human subject. For example, in various examples, the amount of the peptidomimetic macrocycle administered is about 0.01-50 mg/kg, about 0.01-20 mg/kg, about 0.01-10 mg/kg, about 0.1-100 mg/kg, about 0.1-50 mg/kg, about 0.1-20 mg/kg, about 0.1-10 mg/kg, about 0.5-100 mg/kg, about 0.5-50 mg/kg, about 0.5-20 mg/kg, about 0.5-10 mg/kg, about 1-100 mg/kg, about 1-50 mg/kg, about 1-20 mg/kg, about 1-10 mg/kg body weight of the human subject. In one embodiment, about 0.5 mg-10 mg of the peptidomimetic macrocycle per kilogram body weight of the human subject is administered. In some examples the amount of the peptidomimetic macrocycle administered is about 0.16 mg, about 0.32 mg, about 0.64 mg, about 1.28 mg, about 3.56 mg, about 7.12 mg, about 14.24 mg, or about 20 mg per kilogram body weight of the human subject. In some examples the amount of the peptidomimetic macrocycle administered is about 0.16 mg, about 0.32 mg, about 0.64 mg, about 1.28 mg, about 3.56 mg, about 7.12 mg, or about 14.24 mg per kilogram body weight of the human subject. In some examples the amount of the peptidomimetic macrocycle administered is about 0.16 mg per kilogram body weight of the human subject. In some examples the amount of the peptidomimetic macrocycle administered is about 0.32 mg per kilogram body weight of the human subject. In some examples the amount of the peptidomimetic macrocycle administered is about 0.64 mg per kilogram body weight of the human subject. In some examples the amount of the peptidomimetic macrocycle administered is about 1.28 mg per kilogram body weight of the human subject. In some examples the amount of the peptidomimetic macrocycle administered is about 3.56 mg per kilogram body weight of the human subject. In some examples the amount of the peptidomimetic macrocycle administered is about 7.12 mg per kilogram body weight of the human subject. In some examples the amount of the peptidomimetic macrocycle administered is about 14.24 mg per kilogram body weight of the human subject.

[0391] In some embodiments about 0.5-about 20 mg or about 0.5-about 10 mg of the peptidomimetic macrocycle per kilogram body weight of the human subject is administered two times a week. For example about 0.5-about 1 mg, about 0.5-about 5 mg, about 0.5-about 10 mg, about 0.5-about 15 mg, about 1-about 5 mg, about 1-about 10 mg, about 1-about 15 mg, about 1-about 20 mg, about 5-about 10 mg, about 1-about 15 mg, about 5-about 20 mg, about 10-about 15 mg, about 10-about 20 mg, or about 15-about 20 mg of the peptidomimetic macrocycle per kilogram body weight of the human subject is administered about twice a week. In some examples about 1 mg, about 1.25 mg, about 1.5 mg, about 1.75 mg, about 2 mg, about 2.25 mg, about 2.5 mg, about 2.75 mg, about 3 mg, about 3.25 mg, about 3.5 mg, about 3.75 mg, about 4 mg, about 4.25 mg, about 4.5 mg, about 4.75 mg, about 5 mg, about 5.25 mg, about 5.5 mg, about 5.75 mg, about 6 mg, about 6.25 mg, about 6.5 mg, about 6.75 mg, about 7 mg, about 7.25 mg, about 7.5 mg, about 7.75 mg, about 8 mg, about 8.25 mg, about 8.5 mg, about 8.75 mg, about 9 mg, about 9.25 mg, about 9.5 mg, about 9.75 mg, about 10 mg, about 10.25 mg, about 10.5 mg, about 10.75 mg, about 11 mg, about 11.25 mg, about 11.5 mg, about 11.75 mg, about 12 mg, about 12.25 mg, about 12.5 mg, about 12.75 mg, about 13 mg, about 13.25 mg, about 13.5 mg, about 13.75 mg, about 14 mg, about 14.25 mg, about 14.5 mg, about 14.75 mg, about 15 mg, about 15.25 mg, about 15.5 mg, about 15.75 mg, about 16 mg, about 16.5 mg, about 17 mg, about 17.5 mg, about 18 mg, about 18.5 mg, about 19 mg, about 19.5 mg, or about 20 mg of the peptidomimetic macrocycle per kilogram body weight of the human subject is administered two times a week. In some examples, the amount of the peptidomimetic macrocycle administered is about 1.25 mg, about 2.5 mg, about 5 mg, about 10 mg, or about 20 mg per kilogram body weight of the human subject and the peptidomimetic macrocycle is administered two times a week. In some examples, the amount of the peptidomimetic macrocycle administered is about 1.25 mg, about 2.5 mg, about 5 mg or about 10 mg per kilogram body weight of the human subject and the peptidomimetic macrocycle is administered two times a week.

[0392] In some embodiments about 0.5-about 20 mg or about 0.5-about 10 mg of the peptidomimetic macrocycle per kilogram body weight of the human subject is administered once a week. For example about 0.5-about 1 mg, about 0.5-about 5 mg, about 0.5-about 10 mg, about 0.5-about 15 mg, about 1-about 5 mg, about 1-about 10 mg, about 1-about 15 mg, about 1-about 20 mg, about 5-about 10 mg, about 1-about 15 mg, about 5-about 20 mg, about 10-about 15 mg, about 10-about 20 mg, or about 15-about 20 mg of the peptidomimetic macrocycle per kilogram body weight of the human subject is administered once a week. In some examples about 1 mg, about 1.25 mg, about 1.5 mg, about 1.75 mg, about 2 mg, about 2.25 mg, about 2.5 mg, about 2.75 mg, about 3 mg, about 3.25 mg, about 3.5 mg, about 3.75 mg, about 4 mg, about 4.25 mg, about 4.5 mg, about 4.75 mg, about 5 mg, about 5.25 mg, about 5.5 mg, about 5.75 mg, about 6 mg, about 6.25 mg, about 6.5 mg, about 6.75 mg, about 7 mg, about 7.25 mg, about 7.5 mg, about 7.75 mg, about 8 mg, about 8.25 mg, about 8.5 mg, about 8.75 mg, about 9 mg, about 9.25 mg, about 9.5 mg, about 9.75 mg, about 10 mg, about 10.25 mg, about 10.5 mg, about 10.75 mg, about 11 mg, about 11.25 mg, about 11.5 mg, about 11.75 mg, about 12 mg, about 12.25 mg, about 12.5 mg, about 12.75 mg, about 13 mg, about 13.25 mg, about 13.5 mg, about 13.75 mg, about 14 mg, about 14.25 mg, about 14.5 mg, about 14.75 mg, about 15 mg, about 15.25 mg, about 15.5 mg, about 15.75 mg, about 16 mg, about 16.5 mg, about 17 mg, about 17.5 mg, about 18 mg, about 18.5 mg, about 19 mg, about 19.5 mg, or about 20 mg of the peptidomimetic macrocycle per kilogram body weight of the human subject is administered once a week. In some examples, the amount of the peptidomimetic macrocycle administered is about 1.25 mg, about 2.5 mg, about 5 mg, about 10 mg, or about 20 mg per kilogram body weight of the human subject and the peptidomimetic macrocycle is administered once a week. In some examples, the amount of the peptidomimetic macrocycle administered is about 1.25 mg, about 2.5 mg, about 5 mg or about 10 mg per kilogram body weight of the human subject and the peptidomimetic macrocycle is administered once a week

[0393] In some embodiments about 0.5-about 20 mg or about 0.5-about 10 mg of the peptidomimetic macrocycle per kilogram body weight of the human subject is administered 3, 4, 5, 6, or 7 times a week. For example, about 0.5-about 1 mg, about 0.5-about 5 mg, about 0.5-about 10 mg, about 0.5-about 15 mg, about 1-about 5 mg, about 1-about 10 mg, about 1-about 15 mg, about 1-about 20 mg, about 5-about 10 mg, about 1-about 15 mg, about 5-about 20 mg, about 10-about 15 mg, about 10-about 20 mg, or about 15-about 20 mg of the peptidomimetic macrocycle per kilogram body weight of the human subject is administered 3, 4, 5, 6, or 7 times a week. In some examples about 1 mg, about 1.25 mg, about 1.5 mg, about 1.75 mg, about 2 mg, about 2.25 mg, about 2.5 mg, about 2.75 mg, about 3 mg, about 3.25 mg, about 3.5 mg, about 3.75 mg, about 4 mg, about 4.25 mg, about 4.5 mg, about 4.75 mg, about 5 mg, about 5.25 mg, about 5.5 mg, about 5.75 mg, about 6 mg, about 6.25 mg, about 6.5 mg, about 6.75 mg, about 7 mg, about 7.25 mg, about 7.5 mg, about 7.75 mg, about 8 mg, about 8.25 mg, about 8.5 mg, about 8.75 mg, about 9 mg, about 9.25 mg, about 9.5 mg, about 9.75 mg, about 10 mg, about 10.25 mg, about 10.5 mg, about 10.75 mg, about 11 mg, about 11.25 mg, about 11.5 mg, about 11.75 mg, about 12 mg, about 12.25 mg, about 12.5 mg, about 12.75 mg, about 13 mg, about 13.25 mg, about 13.5 mg, about 13.75 mg, about 14 mg, about 14.25 mg, about 14.5 mg, about 14.75 mg, about 15 mg, about 15.25 mg, about 15.5 mg, about 15.75 mg, about 16 mg, about 16.5 mg, about 17 mg, about 17.5 mg, about 18 mg, about 18.5 mg, about 19 mg, about 19.5 mg, or about 20 mg of the peptidomimetic macrocycle per kilogram body weight of the human subject is administered 3, 4, 5, 6, or 7 times a week. In some examples, the amount of the peptidomimetic macrocycle administered is about 1.25 mg, about 2.5 mg, about 5 mg, about 10 mg, or about 20 mg per kilogram body weight of the human subject and the peptidomimetic macrocycle is administered 3, 4, 5, 6, or 7 times a week. In some examples, the amount of the peptidomimetic macrocycle administered is about 1.25 mg, about 2.5 mg, about 5 mg, or about 10 mg per kilogram body weight of the human subject and the peptidomimetic macrocycle is administered 3, 4, 5, 6, or 7 times a week.

[0394] In some embodiments, about 0.5-about 20 mg or about 0.5-about 10 mg of the peptidomimetic macrocycle per kilogram body weight of the human subject is administered once every 2, 3, or 4 weeks. For example, about 0.5-about 1 mg, about 0.5-about 5 mg, about 0.5-about 10 mg, about 0.5-about 15 mg, about 1-about 5 mg, about 1-about 10 mg, about 1-about 15 mg, about 1-about 20 mg, about 5-about 10 mg, about 1-about 15 mg, about 5-about 20 mg, about 10-about 15 mg, about 10-about 20 mg, or about 15-about 20 mg of the peptidomimetic macrocycle per kilogram body weight of the human subject is administrated 3, 4, 5, 6, or 7 once every 2 or 3 week. In some examples about 1 mg, about 1.25 mg, about 1.5 mg, about 1.75 mg, about 2 mg, about 2.25 mg, about 2.5 mg, about 2.75 mg, about 3 mg, about 3.25 mg, about 3.5 mg, about 3.75 mg, about 4 mg, about 4.25 mg, about 4.5 mg, about 4.75 mg, about 5 mg, about 5.25 mg, about 5.5 mg, about 5.75 mg, about 6 mg, about 6.25 mg, about 6.5 mg, about 6.75 mg, about 7 mg, about 7.25 mg, about 7.5 mg, about 7.75 mg, about 8 mg, about 8.25 mg, about 8.5 mg, about 8.75 mg, about 9 mg, about 9.25 mg, about 9.5 mg, about 9.75 mg, about 10 mg, about 10.25 mg, about 10.5 mg, about 10.75 mg, about 11 mg, about 11.25 mg, about 11.5 mg, about 11.75 mg, about 12 mg, about 12.25 mg, about 12.5 mg, about 12.75 mg, about 13 mg, about 13.25 mg, about 13.5 mg, about 13.75 mg, about 14 mg, about 14.25 mg, about 14.5 mg, about 14.75 mg, about 15 mg, about 15.25 mg, about 15.5 mg, about 15.75 mg, about 16 mg, about 16.5 mg, about 17 mg, about 17.5 mg, about 18 mg, about 18.5 mg, about 19 mg, about 19.5 mg, or about 20 mg of the peptidomimetic macrocycle per kilogram body weight of the human subject is administered once every 2 or 3 weeks. In some examples, the amount of the peptidomimetic macrocycle administered is about 1.25 mg, about 2.5 mg, about 5 mg, about 10 mg, or about 20 mg per kilogram body weight of the human subject and the peptidomimetic macrocycle is administered once every 2 weeks. In some examples, the amount of the peptidomimetic macrocycle administered is about 1.25 mg, about 2.5 mg, about 5 mg or about 10 mg per kilogram body weight of the human subject and the peptidomimetic macrocycle is administered once every 2 weeks. In some examples, the amount of the peptidomimetic macrocycle administered is about 1.25 mg, about 2.5 mg, about 5 mg, about 10 mg, or about 20 mg per kilogram body weight of the human subject and the peptidomimetic macrocycle is administered once every 3 weeks. In some examples, the amount of the peptidomimetic macrocycle administered is about 1.25 mg, about 2.5 mg, about 5 mg, or about 10 mg per kilogram body weight of the human subject and the peptidomimetic macrocycle is administered once every 3 weeks.

[0395] In some embodiments, the peptidomimetic macrocycle is administered gradually over a period of time. A desired amount of peptidomimetic macrocycle can, for example can be administered gradually over a period of from about 0.1 h-24 h. In some cases a desired amount of peptidomimetic macrocycle is administered gradually over a period of 0.1 h, 0.5 h, 1 h, 1.5 h, 2 h, 2.5 h, 3 h, 3.5 h, 4 h, 4.5 h, 5 h, 6 h, 7 h, 8 h, 9 h, 10 h, 11 h, 12 h, 13 h, 14 h, 15 h, 16 h, 17 h, 18 h, 19 h, 20 h, 21 h, 22 h, 23 h, or 24 h. In some examples, a desired amount of peptidomimetic macrocycle is administered gradually over a period of 0.25-12 h, for example over a period of 0.25-1 h, 0.25-2 h, 0.25-3 h, 0.25-4 h, 0.25-6 h, 0.25-8 h, 0.25-10 h. In some examples, a desired amount of peptidomimetic macrocycle is administered gradually over a period of 0.25-2 h. In some examples, a desired amount of peptidomimetic macrocycle is administered gradually over a period of 0.25-1 h. In some examples, a desired amount of peptidomimetic macrocycle is administered gradually over a period of 0.25 h, 0.3 h, 0.4 h, 0.5 h, 0.6 h, 0.7 h, 0.8 h, 0.9 h, 1.0 h, 1.1 h, 1.2 h, 1.3 h, 1.4 h, 1.5 h, 1.6 h, 1.7 h, 1.8 h, 1.9 h, or 2.0 h.

[0396] In some examples, a desired amount of peptidomimetic macrocycle is administered gradually over a period of 1 h. In some examples, a desired amount of peptidomimetic macrocycle is administered gradually over a period of 2 h.

[0397] Administration of the peptidomimetic macrocycles can continue as long as necessary. In some embodiments, one or more peptidomimetic macrocycle of the disclosure is administered for more than 1 day, more than 1 week, more than 1 month, more than 2 months, more than 3 months, more than 4 months, more than 5 months, more than 6 months, more than 7 months, more than 8 months, more than 9 months, more than 10 months, more than 11 months, more than 12 months, more than 13 months, more than 14 months, more than 15 months, more than 16 months, more than 17 months, more than 18 months, more than 19 months, more than 20 months, more than 21 months, more than 22 months, more than 23 months, or more than 24 months. In some embodiments, one or more peptidomimetic macrocycle of the disclosure is administered for less than 1 week, less than 1 month, less than 2 months, less than 3 months, less than 4 months, less than 5 months, less than 6 months, less than 7 months, less than 8 months, less than 9 months, less than 10 months, less than 11 months, less than 12 months, less than 13 months, less than 14 months, less than 15 months, less than 16 months, less than 17 months, less than 18 months, less than 19 months, less than 20 months, less than 21 months, less than 22 months, less than 23 months, or less than 24 months.

[0398] In some embodiments, the peptidomimetic macrocycle is administered on day 1, 8, 15 and 28 of a 28 day cycle. In some embodiments, the peptidomimetic macrocycle is administered on day 1, 8, 15 and 28 of a 28 day cycle and administration is continued for two cycles. In some embodiments, the peptidomimetic macrocycle is administered on day 1, 8, 15 and 28 of a 28 day cycle and administration is continued for three cycles. In some embodiments, the peptidomimetic macrocycle is administered on day 1, 8, 15 and 28 of a 28 day cycle and administration is continued for 4, 5, 6, 7, 8, 9, 10, or more cycles.

[0399] In some embodiments, the peptidomimetic macrocycle is administered on day 1, 8, 11 and 21 of a 21-day cycle. In some embodiments, the peptidomimetic macrocycle is administered on day 1, 8, 11 and 21 of a 21-day cycle and administration is continued for two cycles. In some embodiments, the peptidomimetic macrocycle is administered on day 1, 8, 11 and 21 of a 21-day cycle and administration is continued for three cycles. In some embodiments, the peptidomimetic macrocycle is administered on day 1, 8, 11 and 21 of a 21-day cycle and administration is continued for 4, 5, 6, 7, 8, 9, 10, or more cycles.

[0400] In some embodiments, one or more peptidomimetic macrocycle of the disclosure is administered chronically on an ongoing basis. In some embodiments administration of one or more peptidomimetic macrocycle of the disclosure is continued until documentation of disease progression, unacceptable toxicity, or patient or physician decision to discontinue administration.

### Method and Uses

[0401] In one aspect, the disclosure provides a method of treating a cancer in a subject, the method comprising administering to the subject a therapeutically-effective amount of a peptidomimetic macrocycle or a pharmaceutically-acceptable salt thereof, wherein the peptidomimetic macrocycle binds to MDM2 and/or MDMX proteins. In some embodiments, the peptidomimetic macrocycle can disrupt the interaction between p53 and MDM2 and MDMX. In some embodiments, treatment according to the method disclosed herein can result in re-activation of the p53 pathway, decreased cancer cell proliferation, increased p53 protein, increased p21, and/or increased apoptosis in the human subject.

[0402] In one aspect, the disclosure provides a method of treating a cancer, determined to lack a p53 deactivating mutation, in a subject the method comprising administering to the subject a therapeutically-effective amount of a peptidomimetic macrocycle or a pharmaceutically-acceptable salt thereof, wherein the peptidomimetic macrocycle binds to MDM2 and/or MDMX proteins. In some embodiments, the peptidomimetic macrocycle can disrupt the interaction between p53 and MDM2 and MDMX. The method further can comprise confirming the lack of the p53 deactivating mutation in the subject prior to the administration of the peptidomimetic macrocycle. In some embodiments, treatment according to the method disclosed herein can result in re-activation of the p53 pathway, decreased cancer cell proliferation, increased p53 protein, increased p21, and/or increased apoptosis in the human subject.

[0403] In one aspect, the disclosure provides a method of treating cancer in a subject expressing wild type p53, the method comprising administering to the subject a therapeutically-effective amount of a peptidomimetic macrocycle or a pharmaceutically-acceptable salt thereof, wherein the peptidomimetic macrocycle binds to MDM2 and/or MDMX proteins. In some embodiments, the peptidomimetic macrocycle can disrupt the interaction between p53 and MDM2 and MDMX. The method further can comprise confirming the wild type p53 status of the subject prior to the administration of the peptidomimetic macrocycle. In some embodiments, treatment according to the method disclosed herein can result in re-activation of the p53 pathway, decreased cancer cell proliferation, increased p53 protein, increased p21, and/or increased apoptosis in the human subject.

[0404] In some embodiments, the methods for treating a cancer provided herein inhibit, reduce, diminish, arrest, or stabilize a cancer cell associated with cancer. In other embodiments, the methods for treating cancer provided herein inhibit, reduce, diminish, arrest, or stabilize the symptoms associated with the cancer or two or more symptoms thereof. In some examples, the methods for treating cancer provided herein cause the reduction in the number of cancer cells and/or one or more symptoms associated with the cancer. In other examples, the methods for treating cancer provided herein maintain the number of cancer cells so that they do not increase, or so that the number of cancer cells increases by less than the increase of a number of cancer cells after administration of a standard therapy as measured by, for example, conventional methods available to one of skill in the art, such as ultrasound, CT Scan, MRI, dynamic contrast-enhanced MRI, or PET Scan. In some examples, the methods for treating cancer provided herein decrease the number of cancer cells. In some examples, the methods for treating cancer provided herein reduce the formation of cancer cells. In some examples, the methods for treating cancer provided herein eradicate, remove, or control primary, regional and/or metastatic cancer cells associated with the cancer. In some examples, the methods for treating cancer provided herein decrease the number or size of metastases associated with the cancer. In some examples, the methods for treating cancer provided herein reduce the number of cancer cells in a subject by an amount in the range of about 5-about 10%, about 5-about 20%, about 10-about 20%, about 15-about 20%, about 10-about 30%, about 20-about 30%, about 20-about 40%, about 30-about 40%, about 10-about 50%, about 20-about 50%, about 30-about 50%, about 40-about 50%, about 10-about 60%, about 20-about 60%, about 30-about 60%, about 40-about 60%, about 50-about 60%, about 10-about 70%, about 20-about 70%, about 30-about 70%, about 40-about 70%, about 50-about 70%, about 60-about 70%, about 10-about 80%, about 20-about 80%, about 30-about 80%, about 40-about 80%, about 50-about 80%, about 60-about 80%, about 70-about 80%, about 10-about 90%, about 20-about 90%, about 30-about 90%, about 40-about 90%, about 50-about 90%, about 60-about 90%, about 70-about 90%, about 80-about 90%, about 10-about 100%, about 20%-about 100%, about 30-about 100%, about 40-about 100%, about 50-about 100%, about 60-about 100%, about 70-about 100%, about 80-about 100%, about 90-about 100%, about 95-about 100%, or any range in between, relative to the number of cancer cells in a subject prior to administration of the peptidomimetic macrocycles as assessed by, for example, CT Scan, MRI, DCE-MRI, or PET Scan. In certain embodiments, the methods herein reduce the number of cancer cells in a subject by at least about 5%, at least about 10%, at least about 15%, at least about 20%, at least about 25%, at least about 30%, at least about 35%, at least about 40%, at least about 45%, at least about 50%, at least about 55%, at least about 60%, at least about 65%, at least about 70%, at least about 75%, at least about 80%, at least about 85%, at least about 90%, at least about 95%, at least about 99%, or about 100%, relative to the number of cancer cells prior to administration of the peptidomimetic macrocycle as assessed by, for example, CT Scan, MRI, DCE-MRI, or PET Scan.

[0405] In some embodiments, the methods provided herein reduce the cancer cell perfusion in a subject by an amount in the range of about 5-about 10%, about 5-about 20%, about 10-about 20%, about 15-about 20%, about 10-about 30%, about 20-about 30%, about 20-about 40%, about 30-about 40%, about 10-about 50%, about 20-about 50%, about 30-about 50%, about 40-about 50%, about 10-about 60%, about 20-about 60%, about 30-about 60%, about 40-about 60%, about 50-about 60%, about 10-about 70%, about 20-about 70%, about 30-about 70%, about 40-about 70%, about 50-about 70%, about 60-about 70%, about 10-about 80%, about 20-about 80%, about 30-about 80%, about 40-about 80%, about 50-about 80%, about 60-about 80%, about 70-about 80%, about 10-about 90%, about 20-about 90%, about 30-about 90%, about 40-about 90%, about 50-about 90%, about 60-about 90%, about 70-about 90%, about 80-about 90%, about 10-about 100%, about 20%-about 100%, about 30-about 100%, about 40-about 100%, about 50-about 100%, about 60-about 100%, about 70-about 100%, about 80-about 100%, about 90-about 100%, about 95-about 100%, or any range in between, relative to cancer cell perfusion prior to administration of the peptidomimetic macrocycle, as assessed by, for example, MRI, DCE-MRI, or PET Scan. In certain embodiments, the methods provided herein reduce the cancer cell perfusion in a subject by at least about 5%, about 10%, about 15%, about 20%, about 25%, about 30%, about 35%, about 40%, about 45%, about 50%, about 55%, about 60%, about 65%, about 70%, about 75%, about 80%, about 85%, about 90%, about 95%, about 99%, or about 100%, relative to cancer cell perfusion prior to administration of the peptidomimetic macrocycle as assessed by, for example, MRI, DCE-MRI, or PET Scan.

[0406] In some embodiments, the methods provided herein inhibit or decrease cancer cell metabolism in a subject in the range of about 5-about 10%, about 5-about 20%, about 10-about 20%, about 15-about 20%, about 10-about 30%, about 20-about 30%, about 20-about 40%, about 30-about 40%, about 10-about 50%, about 20-about 50%, about 30-about 50%, about 40-about 50%, about 10-about 60%, about 20-about 60%, about 30-about 60%, about 40-about 60%, about 50-about 60%, about 10-about 70%, about 20-about 70%, about 30-about 70%, about 40-about 70%, about 50-about 70%, about 60-about 70%, about 10-about 80%, about 20-about 80%, about 30-about 80%, about 40-about 80%, about 50-about 80%, about 60-about 80%, about 70-about 80%, about 10-about 90%, about 20-about 90%, about 30-about 90%, about 40-about 90%, about 50-about 90%, about 60-about 90%, about 70-about 90%, about 80-about 90%, about 10-about 100%, about 20%-about 100%, about 30-about 100%, about 40-about 100%, about 50-about 100%, about 60-about 100%, about 70-about 100%, about 80-about 100%, about 90-about 100%, about 95-about 100%, or any range in between, relative to cancer cell metabolism prior to administration of the peptidomimetic macrocycle, as assessed by, for example, MRI, DCE-MRI, or PET Scan. In certain embodiments, the methods provided herein inhibit or decrease cancer cell metabolism in a subject as assessed by, for example, PET scanning. In specific embodiments, the methods provided herein inhibit or decrease cancer cell metabolism in a subject by at least about 5%, at least about 10%, at least about 15%, at least about 20%, at least about 25%, at least about 30%, at least about 35%, at least about 40%, at least about 45%, at least about 50%, at least about 55%, at least about 60%, at least about 65%, at least about 70%, at least about 75%, at least about 80%, at least about 85%, at least about 90%, at least about 95%, or about 100%, relative to cancer cell metabolism prior to administration of the peptidomimetic macrocycle.

[0407] In other aspect, the disclosure provides a method for increasing the survival time of a subject with cancer determined to lack a p53 deactivating mutation and/or with cancer expressing wild type p53, the method comprising administering to the subject a therapeutically effective amount of a peptidomimetic macrocycle or a pharmaceutically acceptable salt thereof, wherein the peptidomimetic macrocycle binds to MDM2 and/or MDMX proteins. In some examples, the survival time of the subject is at least 30 days longer than the expected survival time of the subject if the subject was not treated according to the methods provided herein. In some examples, the survival time of the subject is at 1 month-about 5 years longer than the expected survival time of the subject if the subject was not treated according to the methods provided herein. For example, the survival time of the subject is at least 3 months, at least 6 months, at least 9 months, at least 12 months, at least 15 months, at least 18 months, at least 21 months, or at least 24 months longer than the expected survival time of the subject if the subject was not treated according to the methods disclosed herein disclosure.

[0408] In one aspect, the disclosure provides a method to assessed presence, absence or amount of the biomarker biomarkers in a subject suffering with cancer. In some examples, the biomarkers include patient biomarkers, for example, the p53 status of the subject and the MDM2 and MDMX expression levels in the subject.

[0409] The method of the disclosure can also optionally include studying and/or evaluating the safety and/or tolerability of the peptidomimetic macrocycles disclosed herein in the subject.

[0410] Also provided herein is a method to re-activate the p53 pathway in a subject with a cancer lacking a p53 deactivating mutation and/or expressing wild type p53, the method comprising administering to the subject a therapeutically effective amount of a peptidomimetic macrocycle or a pharmaceutically acceptable salt thereof, wherein the peptidomimetic macrocycle binds to MDM2 and/or MDMX proteins.

[0411] Also provided herein is a method to decrease cancer cell proliferation in a human subject with a cancer lacking a p53 deactivating mutation and/or expressing wild type p53, the method comprising administering to the subject a therapeutically effective amount of a peptidomimetic macrocycle or a pharmaceutically acceptable salt thereof, wherein the peptidomimetic macrocycle binds to MDM2 and/or MDMX proteins.

[0412] Also provided herein is a method to increased p53 protein in a subject with a cancer lacking a p53 deactivating mutation and/or expressing wild type p53, the method comprising administering to the subject a therapeutically effective amount of a peptidomimetic macrocycle or a pharmaceutically acceptable salt thereof, wherein the peptidomimetic macrocycle binds to MDM2 and/or MDMX proteins.

[0413] Also provided herein is a method to increased p21 in a subject with a cancer lacking a p53 deactivating mutation and/or expressing wild type p53, the method comprising administering to the subject a therapeutically effective amount of a peptidomimetic macrocycle or a pharmaceutically acceptable salt thereof, wherein the peptidomimetic macrocycle binds to MDM2 and/or MDMX proteins.

[0414] Also provided herein is a method to increased apoptosis in a subject with a cancer lacking a p53 deactivating mutation and/or expressing wild type p53, the method comprising administering to the subject a therapeutically effective amount of a peptidomimetic macrocycle or a pharmaceutically acceptable salt thereof, wherein the peptidomimetic macrocycle binds to MDM2 and/or MDMX proteins.

[0415] In some embodiments, the disclosure also provides a method to determine the dose limiting toxicities (DLTs) and/or maximum tolerated dose (MTD or OBD) or the optimal biological dose (OBD) of the peptidomimetic macrocycles disclosed herein in subject with a cancer (e.g., a lymphoma) lacking a p53 deactivating mutation and/or expressing wild type p53.

[0416] The methods of the disclosure can optionally include pharmacokinetic analysis of the peptidomimetic macrocycles disclosed herein. Accordingly, the methods can further comprise collecting one or more biological sample from the subject at one or more specific time point and analyzing the one or more biological sample for levels of the peptidomimetic macrocycles and/or it metabolites. The biological sample can be a blood sample from the subject, for example, a blood sample from a human subject. The one or more specific time point can include time points before, after and/or during the administration of the peptidomimetic macrocycle to the subject. In some embodiments one or more biological sample includes biological samples collected before and after each administration of the peptidomimetic macrocycle to the subject. In some embodiments a biological sample for pharmacokinetic analysis is collected before the first administration of the peptidomimetic macrocycle to the subject and at one or more time points after each administration of the peptidomimetic macrocycles to the subject. The biological sample collected before the administration of the peptidomimetic macrocycle to the subject can be done within 0-24 hour before the start of administration of the peptidomimetic macrocycle to the subject. For example, the biological sample can be collected within 24 h, within 23 h, within 22 h, within 21 h, within 20 h, within 19 h, within 18 h, within 17 h, within 16 h, within 15 h, within 14 h, within 13 h, within 12 h, within 11 h, within 10 h, within 9 h, within 8 h, within 7 h, within 6 h, within 5 h, within 4 h, within 3 h, within 2 h, within 1 h, within 30 min, within 15 min, or immediately before the administration of the peptidomimetic macrocycle to the subject. One or more biological samples collected after the administration of the peptidomimetic macrocycle to the subject can be collected, for example after 0 min, 5 min, 10 min, 20 min, 30 min, 45 min, 60 min, 1.25 h, 1.5 h, 1.75 h, 2.0 h, 2.25 h, 2.5 h, 2.75 h, 3.0 h, 3.25 h, 3.5 h, 3.75 h, 4.0 h, 4.25 h, 4.5 h, 4.75 h, 5.0 h, 5.25 h, 5.5 h, 5.75 h, 6.0 h, 6.25 h, 6.5 h, 6.75 h, 7.0 h, 7.25 h, 7.5 h, 7.75 h, 8.0 h, 8.25 h, 8.5 h, 8.75 h, 9.0 h, 9.25 h, 9.5 h, 9.75 h, 10.0 h, 10.25 h, 10.5 h, 10.75 h, 11.0 h, 11.25 h, 11.5 h, 11.75 h, 12.0 h, 20 h, 24 h, 28 h, 32 h, 36 h, 40 h, 44 h, 48 h, 52 h, 56 h, 60 h, 64 h, 68 h, 72 h, or 0-72 h after the administration of the peptidomimetic macrocycle to the subject. In some embodiments, the peptidomimetic macrocycle is administered on day 1, day 8, day 15 of a 28 day cycle and biological sample is collected before administration on day 1, after the administration on day 1 (multiple biological samples can be collected, for example after about 0 min, about 30 min, about 1 h, about 2 h, about 4 h, about 8 h, about 24 h, and 48 hour after administration), before administration on day 8, after administration on day 8 (multiple biological samples can be collected, for example after about 0 min, about 30 min, about 1 h, about 2 h, and about 4 h after administration), before administration on day 15 and after administration on day 15 (multiple biological samples can be collected, for example after about 0 min, about 30 min, about 1 h, about 2 h, about 4 h, about 8 h, and about 24 h after administration). In some embodiments, the peptidomimetic macrocycle is administered on day 1, day 8, day 11 of a 21 day cycle and biological sample is collected before administration on day 1, after the administration on day 1 (multiple biological samples can be collected, for example after about 0 min, about 30 min, about 1 h, about 2 h, about 4 h, about 8 h, about 24 h, and 48 hour after administration), before administration on day 8, after administration on day 8 (multiple biological samples can be collected, for example after about 0 min, about 30 min, about 1 h, about 2 h, and about 4 h after administration), before administration on day 11 and after administration on day 11 (multiple biological samples can be collected, for example after about 0 min, about 30 min, about 1 h, about 2 h, about 4 h, about 8 h, and about 24 h after administration).

[0417] The method of the disclosure can optionally include pharmacodynamic analysis of the peptidomimetic macrocycles disclosed herein. Accordingly, the methods can comprise collecting one or more biological samples from the subject at one or more specific time points for pharmacodynamic analysis. Pharmacodynamic analysis can include analyzing the levels of biomarkers including MIC-1, p53, MDM2, MDMX, p21 and/or cases in the biological sample. Detection of biomarkers in a biological sample can be performed by, for example, direct measurement, immunohistochemistry, immunoblotting, immunoflourescense, immunoabsorbence, immunoprecipitations, protein array, flourescence in situ hybridization, FACS analysis, hybridization, in situ hybridization, Northern blots, Southern blots, Western blots, ELISA, radioimmunoassay, gene array/chip, PCR, RT-PCR, or cytogenetic analysis. The biological sample for pharmacodynamic analysis can be a blood sample or a cancer cell specimen from the subject, for example, a biological sample for pharmacodynamic analysis can be a blood sample or a cancer cell specimen from the human subject. The biological samples for pharmacodynamic analysis of the peptidomimetic macrocycles can be collected any time before, during, or after the administration of the peptidomimetic macrocycle to the subject. In some embodiments a blood sample for pharmacokinetic analysis is collected before the first administration of the peptidomimetic macrocycle to the subject and at one or more time points after each administration of the peptidomimetic macrocycles to the subject. The blood sample collected before the administration of the peptidomimetic macrocycle to the subject can be done within 0-24 hour before the start of administration of the peptidomimetic macrocycle to the subject. For example, the biological sample can be collected within 24 h, within 23 h, within 22 h, within 21 h, within 20 h, within 19 h, within 18 h, within 17 h, within 16 h, within 15 h, within 14 h, within 13 h, within 12 h, within 11 h, within 10 h, within 9 h, within 8 h, within 7 h, within 6 h, within 5 h, within 4 h, within 3 h, within 2 h, within 1 h, within 30 min, within 15 min of, or immediately before the administration of the peptidomimetic macrocycle to the subject. One or more blood samples for pharmacodynamic analysis collected after the administration of the peptidomimetic macrocycle to the subject can be collected from 0-about 72 h, for example after about 12 h, after about 24 h, after about 36 h or after about 48 h after the administration of the peptidomimetic macrocycle to the subject. In some embodiments, the peptidomimetic macrocycle is administered on day 1, day 8, day 15 of a 28 day cycle and blood samples for pharmacodynamic analysis are collected before administration on day 1, after the administration on day 1 (multiple samples can be collected, for example after about 24 h and 48 hour after administration), before administration on day 8, after administration on day 8 (multiple samples can be collected, for example with about 1 h administration), before administration on day 15 and after administration on day 15 (multiple samples can be collected, for example with about 1 h and about 48 h after administration), and day 22. Biological samples for pharmacodynamic analysis can be collected at any time before, after or during the administration of the peptidomimetic macrocycle to the subject. For example the peptidomimetic macrocycle can be administered on day 1, day 8, day 15 of a 28 day cycle and cancer cell samples for pharmacodynamic analysis are collected before administration on day 1 and between day 14-day 18, for example of day 16. In some embodiments, the peptidomimetic macrocycle is administered on day 1, day 8, day 11, of a 21 day cycle and blood samples for pharmacodynamic analysis are collected before administration on day 1, after the administration on day 1 (multiple samples can be collected, for example after about 24 h and 48 hour after administration), before administration on day 8, after administration on day 8 (multiple samples can be collected, for example with about 1 h administration), before administration on day 11 and after administration on day 11 (multiple samples can be collected, for example with about 1 h and about 48 h after administration), and day 22. Biological samples for pharmacodynamic analysis can be collected at any time before, after or during the administration of the peptidomimetic macrocycle to the subject. For example the peptidomimetic macrocycle can be administered on day 1, day 8, day 11 of a 21 day cycle and cancer cell samples for pharmacodynamic analysis are collected before administration on day 1 and between day 10-day 14, for example of day 12.

[0418] The method of the disclosure can optionally include clinical activity analysis of the peptidomimetic macrocycles disclosed herein. Accordingly, the methods can comprise analyzing one or more biological samples collected from the subject at one or more specific time points. Any appropriate analytical procedure can be used for the analysis of the biological samples. For example, imaging techniques like radiographs, ultrasound, CT scan, PET scan, MRI scan, chest x-ray, laparoscopy, complete blood count (CBC) test, bone scanning and fecal occult blood test can be used. Further analytical procedures that can be used include blood chemistry analysis, chromosomal translocation analysis, needle biopsy, tissue biopsy, fluorescence in situ hybridization, laboratory biomarker analysis, immunohistochemistry staining method, flow cytometry, or a combination thereof. The method can further comprise tabulating and/or plotting results of the analytical procedure.

[0419] For example, pharmacodynamics can be assessed by laboratory-based evaluation of several biomarkers of p53 activation, including levels of p21, caspase and MDM2 in cancer cell tissue, and where available in CTC, as well as MIC-1 in blood, before and after treatment with the peptidomimetic macrocycles.

[0420] Results available from previous genetic and biomarker tests and additional tests of the blood and cancer cell samples for biomarkers relevant to the safety and efficacy of the peptidomimetic macrocycles can be investigated for possible correlation with patient outcome.

[0421] For example, clinical activity or response can be evaluated by standard imaging assessments, such as computed tomography (CT), magnetic resonance imaging (MRI), and bone scans. In addition, [¹⁸]-fluorodeoxyglucose and [¹⁸]-fluorothymidine positron emission tomography (FDG-PET and FLT-PET, respectively), or other techniques considered clinically appropriate for the patient's specific disease type can be used. CT-imaging can be performed, for example, at the end of Cycle 2, and every 2 cycles (e.g., Cycles 4 and 6) thereafter for DR-A and after the last infusion in Cycle 3 and every 3 cycles (e.g., Cycles 6 and 9) thereafter in DR-B. Anti-cancer cell activity can be assessed using IWG (2014) (Appendix H) criteria for patients with lymphomas. Additionally, for patients with an FDG-avid lymphoma, FDG-PET imaging can be performed at baseline and post-baseline as outlined in IWG 2014. FLT-PET imaging can be performed at baseline for patients with cancer cell commonly showing sufficient uptake of FLT tracer, e.g., patients with lymphoma. For example, DR-A assigned patients who demonstrate a standard uptake value (SUV) of >5 at baseline can have a repeat FLT image one day after their last infusion of study medication in Cycle 1, i.e., Day 16. For example, DR-B patients who demonstrate a standard uptake value (SUV) of >5 at baseline can have a repeat FLT image one day after their last infusion of study medication in Cycle 1, i.e., Day 12.

### Biological Samples

[0422] As used in the present application, “biological sample” means any fluid or other material derived from the body of a normal or diseased subject, such as blood, serum, plasma, lymph, urine, saliva, tears, cerebrospinal fluid, milk, amniotic fluid, bile, ascites fluid, pus, and the like. Also included within the meaning of the term “biological sample” is an organ or tissue extract and culture fluid in which any cells or tissue preparation from a subject has been incubated. The biological samples can be any samples from which genetic material can be obtained. Biological samples can also include solid or liquid cancer cell samples or specimens. The cancer cell sample can be a cancer cell tissue sample. In some embodiments, the cancer cell tissue sample can obtained from surgically excised tissue. Exemplary sources of biological samples include fine needle aspiration, core needle biopsy, vacuum assisted biopsy, incisional biopsy, excisional biopsy, punch biopsy, shave biopsy or skin biopsy. In some cases, the biological samples comprise fine needle aspiration samples. In some embodiments, the biological samples comprise tissue samples, including, for example, excisional biopsy, incisional biopsy, or other biopsy. The biological samples can comprise a mixture of two or more sources; for example, fine needle aspirates and tissue samples. Tissue samples and cellular samples can also be obtained without invasive surgery, for example by punctuating the chest wall or the abdominal wall or from masses of breast, thyroid or other sites with a fine needle and withdrawing cellular material (fine needle aspiration biopsy). In some embodiments, a biological sample is a bone marrow aspirate sample. A biological sample can be obtained by methods known in the art such as the biopsy methods provided herein, swabbing, scraping, phlebotomy, or any other suitable method.

[0423] The biological samples obtained can be used in fresh, frozen, or fixed (e.g., formaldehyde fixed-paraffin embedded) form, depending on the nature of the sample, the assay used, and the convenience of the practitioner. Although fresh, frozen and fixed materials are suitable for various RNA and protein assays, generally, fresh tissues can be preferred for ex vivo measurements of activity.

[0424] Fixed tissue samples can also be employed. Tissue obtained by biopsy is often fixed, usually by formalin, formaldehyde, or gluteraldehyde, for example, or by alcohol immersion. Fixed biological samples are often dehydrated and embedded in paraffin or other solid supports. See the reference Plenat et al., 2001, Ann. Pathol. 21:29-47. Non-embedded, fixed tissue, as well as fixed and embedded tissue, can be used in the present methods. Solid supports for embedding fixed tissue can be removed with organic solvents to enable subsequent rehydration of preserved tissue.

[0425] In some cases, the assay includes a step of cell or tissue culture. For example, cells from a biopsy can be disaggregated using enzymes (such as collagenase and hyaluronidase) and or physical disruption (e.g., repeated passage through a 25-gauge needle) to dissociate the cells, collected by centrifugation, and resuspended in desired buffer or culture medium for culture, immediate analysis, or further processing.

### Subject/Patient Population

[0426] In some embodiments, a subject treated for cancer in accordance with the methods provided herein is a human, who has or is diagnosed with a cancer. In other embodiments, a subject treated for cancer in accordance with the methods provided herein is a human, predisposed or susceptible to a cancer. In some embodiments, a subject treated for cancer in accordance with the methods provided herein is a human, at risk of developing a cancer.

[0427] In some embodiments, a subject treated for cancer in accordance with the methods provided herein is a human, who has or is diagnosed with a cancer, determined to lack a p53 deactivating mutation and/or expressing wild type p53. In other embodiments, a subject treated for cancer in accordance with the methods provided herein is a human, predisposed or susceptible to a cancer, determined to lack a p53 deactivating mutation and/or expressing wild type p53. In some embodiments, a subject treated for cancer in accordance with the methods provided herein is a human, at risk of developing a cancer, determined to lack a p53 deactivating mutation and/or expressing wild type p53. A p53 deactivating mutation, as used herein is any mutation that leads to loss of (or a decrease in) the in vitro apoptotic activity of p53. Non limiting examples of p53 deactivating mutations are included in Table 1. Accordingly, in some embodiments, a subject with a cancer in accordance with the composition as provided herein is a human who has or is diagnosed with a cancer that is determined to lack a p53 deactivation mutation, such as those shown in Table 7.

[0428] In some embodiments, a subject treated for cancer in accordance with the methods provided herein is a human, who has or is diagnosed with a cancer, determined to lack a dominant p53 deactivating mutation. Dominant p53 deactivating mutation or dominant negative mutation, as used herein, is a mutation wherein the mutated p53 inhibits or disrupt the activity of the wild type p53 gene.

TABLE 7
Examples of p53 deactivating mutations

| Mutation at position | Amino acid change |
|---|---|
| 62 | E62_W91del |
| 122 | V122X |
| 135 | C135S |
| 143 | V143A |
| 144 | Q144P |
| 146 | W146X |
| 157 | V157F |
| 158 | R158H |
| 163 | Y163N |
| 168 | H168Y |
| 173 | V173L |
| 175 | R175H |
| 175 | R175P |
| 175 | R175Q |
| 175 | R175S |
| 219 | P219H |
| 234 | Y234C |
| 234 | Y234H |
| 237 | M237I |
| 240 | S240R |
| 245 | G245C |
| 245 | G245S |
| 246 | M246I |
| 248 | R248Q |
| 248 | R248W |
| 249 | R249S |
| 272 | V272M |
| 273 | R273H |
| 274 | V274F |
| 279 | G279E |
| 280 | R280K |
| 281 | D281H |
| 282 | R282W |
| 306 | R306P |
| 308 | P300_L308del |
| 327 | P300_Y327del |
| 332 | D324_I332del |
| 337 | R337C |
| 344 | L344P |

[0429] Table 7 refers to the sequence of the wild type human TP53 tumor protein p53 shown in FIG. 1. Amino acid changes are reported as: the amino acid being substituted followed by the position of the amino acid being substituted in the wild type p53 sequence, followed by the amino acid used for substitution. For example L344P, indicates that the leucine residue (L) at the 344 position in the wild type sequence is replaced by a proline residue (P).

[0430] In some embodiments, a subject treated for cancer in accordance with the methods provided herein is a refractory patient. In a certain embodiment, a refractory patient is a patient refractory to a standard therapy (e.g., surgery, radiation, anti-androgen therapy and/or drug therapy such as chemotherapy). In certain embodiments, a patient with the cancer is refractory to a therapy when the cancer has not significantly been eradicated and/or the one or more symptoms have not been significantly alleviated. The determination of whether a patient is refractory can be made either in vivo or in vitro by any method known in the art for assaying the effectiveness of a treatment of cancer. In various embodiments, a patient with cancer is refractory when the number of CTCs or MNBCs associated with the cancer has not decreased or has increased. In various embodiments, a patient with cancer is refractory when one or more cancer cells metastasize and/or spread to another organ.

[0431] In some embodiments, a subject treated for cancer accordance with the methods provided herein is a human that has proven refractory to therapies other than treatment with the peptidomimetic macrocycles of the disclosure, but is no longer on these therapies. In certain embodiments, a subject treated for cancer in accordance with the methods provided herein is a human already receiving one or more conventional anti-cancer therapies, such as surgery, drug therapy such as chemotherapy, anti-androgen therapy or radiation. Among these patients are refractory patients, patients who are too young for conventional therapies, and patients with recurring cancer cells despite treatment with existing therapies.

[0432] In some embodiments, the subject is a human who has had at least one unsuccessful prior treatment and/or therapy of the cancer.

Methods of Detecting Wild Type p53 and/or p53 Mutations

[0433] In some embodiments, a subject lacking p53-deactivating mutations is a candidate for cancer treatment with a compound of the invention. Cancer cells from patient groups should be assayed in order to determine p53-deactivating mutations and/or expression of wild type p53 prior to treatment with a compound of the invention.

[0434] The activity of the p53 pathway can be determined by the mutational status of genes involved in the p53 pathways, including, for example, AKT1, AKT2, AKT3, ALK, BRAF, CDK4, CDKN2A, DDR2, EGFR, ERBB2 (HER2), FGFR1, FGFR3, GNA11, GNQ, GNAS, KDR, KIT, KRAS, MAP2K1 (MEK1), MET, HRAS, NOTCH1, NRAS, NTRK2, PIK3CA, NF1, PTEN, RAC1, RB1, NTRK3, STK11, PIK3R1, TSC1, TSC2, RET, TP53, and VHL. Genes that modulate the activity of p53 can also be assessed, including, for example, kinases: ABL1, JAK1, JAAK2, JAK3; receptor tyrosine kinases: FLT3 and KIT; receptors: CSF3R, IL7R, MPL, and NOTCH1; transcription factors: BCOR, CEBPA, CREBBP, ETV6, GATA1, GATA2. MLL, KZF1, PAXS, RUNX1, STAT3, WT1, and TP53; epigenetic factors: ASXL1, DNMT3A, EZH2, KDM6A (UTX), SUZ12, TET2, PTPN11, SF3B1, SRSF2, U2AF35, ZRSR2; RAS proteins: HRAS, KRAS, and NRAS; adaptors CBL and CBL-B; FBXW7, IDH1, IDH2, and NPM1.

[0435] Cancer cell samples can be obtained, for example, from solid or liquid tumors via primary or metastatic tumor resection (e.g. pneumonectomy, lobetomy, wedge resection, and craniotomy) primary or metastatic disease biopsy (e.g. transbronchial or needle core), pleural or ascites fluid (e.g. FFPE cell pellet), bone marrow aspirate, bone marrow clot, and bone marrow biopsy, or macro-dissection of tumor rich areas (solid tumors).

[0436] To detect the p53 wild type gene and/or lack of p53 deactivation mutation in a tissue, cancerous tissue can be isolated from surrounding normal tissues. For example, the tissue can be isolated from paraffin or cryostat sections. Cancer cells can also be separated from normal cells by flow cytometry. If the cancer cells tissue is highly contaminated with normal cells, detection of mutations can be more difficult.

[0437] Various methods and assays for analyzing wild type p53 and/or p53 mutations are suitable for use in the invention. Non-limiting examples of assays include polymerase chain reaction (PCR), restriction fragment length polymorphism (RFLP), microarray, Southern Blot, Northern Blot, Western Blot, Eastern Blot, H&E staining, microscopic assessment of tumors, next-generation DNA sequencing (NGS) (e.g. extraction, purification, quantitiation, and amplification of DNA, library preparation), immunohistochemistry, and fluorescent in situ hybridization (FISH).

[0438] A microarray allows a researcher to investigate multiple DNA sequences attached to a surface, for example, a DNA chip made of glass or silicon, or a polymeric bead or resin. The DNA sequences are hybridized with fluorescent or luminescent probes. The microarray can indicate the presence of oligonucleotide sequences in a sample based on hybridization of sample sequences to the probes, followed by washing and subsequent detection of the probes. Quantification of the fluorescent or luminescent signal indicates the presence of known oligonucleotide sequences in the sample.

[0439] PCR allows amplification of DNA oligomers rapidly, and can be used to identify an oligonucleotide sequence in a sample. PCR experiments involve contacting an oligonucleotide sample with a PCR mixture containing primers complementary to a target sequence, one or more DNA polymerase enzymes, deoxnucleotide triphosphate (dNTP) building blocks, including dATP, dGTP, dTTP, and dCTP, and suitable buffers, salts, and additives. If a sample contains an oligonucleotide sequence complementary to a pair of primers, the experiment amplifies the sample sequence, which can be collected and identified.

[0440] In some embodiments, an assay comprises amplifying a biomolecule from the cancer sample. The biomolecule can be a nucleic acid molecule, such as DNA or RNA. In some embodiments, the assay comprises circularization of a nucleic acid molecule, followed by digestion of the circularized nucleic acid molecule.

[0441] In some embodiments, the assay comprises contacting an organism, or a biochemical sample collected from an organism, such as a nucleic acid sample, with a library of oligonucleotides, such as PCR primers. The library can contain any number of oligonucleotide molecules. The oligonucleotide molecules can bind individual DNA or RNA motifs, or any combination of motifs described herein. The motifs can be any distance apart, and the distance can be known or unknown. In some embodiments, two or more oligonucleotides in the same library bind motifs a known distance apart in a parent nucleic acid sequence. Binding of the primers to the parent sequence can take place based on the complementarity of the primers to the parent sequence. Binding can take place, for example, under annealing, or under stringent conditions.

[0442] In some embodiments, the results of an assay are used to design a new oligonucleotide sequence for future use. In some embodiments, the results of an assay are used to design a new oligonucleotide library for future use. In some embodiments, the results of an assay are used to revise, refine, or update an existing oligonucleotide library for future use. For example, an assay can reveal that a previously-undocumented nucleic acid sequence is associated with the presence of a target material. This information can be used to design or redesign nucleic acid molecules and libraries.

[0443] In some embodiments, one or more nucleic acid molecules in a library comprise a barcode tag. In some embodiments, one or more of the nucleic acid molecules in a library comprise type I or type II restriction sites suitable for circularization and cutting an amplified sample nucleic acid sequence. Such primers can be used to circularize a PCR product and cut the PCR product to provide a product nucleic acid sequence with a sequence that is organized differently from the nucleic acid sequence native to the sample organism.

[0444] After a PCR experiment, the presence of an amplified sequence can be verified. Non-limiting examples of methods for finding an amplified sequence include DNA sequencing, whole transcriptome shotgun sequencing (WTSS, or RNA-seq), mass spectrometry (MS), microarray, pyrosequencing, column purification analysis, polyacrylamide gel electrophoresis, and index tag sequencing of a PCR product generated from an index-tagged primer.

[0445] In some embodiments, more than one nucleic acid sequence in the sample organism is amplified. Non-limiting examples of methods of separating different nucleic acid sequences in a PCR product mixture include column purification, high performance liquid chromatography (HPLC), HPLC/MS, polyacrylamide gel electrophoresis, size exclusion chromatography.

[0446] The amplified nucleic acid molecules can be identified by sequencing. Nucleic acid sequencing can be done on automated instrumentation. Sequencing experiments can be done in parallel to analyze tens, hundreds, or thousands of sequences simultaneously. Non-limiting examples of sequencing techniques follow.

[0447] In pyrosequencing, DNA is amplified within a water droplet containing a single DNA template bound to a primer-coated bead in an oil solution. Nucleotides are added to a growing sequence, and the addition of each base is evidenced by visual light.

[0448] Ion semiconductor sequencing detects the addition of a nucleic acid residue as an electrical signal associated with a hydrogen ion liberated during synthesis. A reaction well containing a template is flooded with the four types of nucleotide building blocks, one at a time. The timing of the electrical signal identifies which building block was added, and identifies the corresponding residue in the template.

[0449] DNA nanoball uses rolling circle replication to amplify DNA into nanoballs. Unchained sequencing by ligation of the nanoballs reveals the DNA sequence.

[0450] In a reversible dyes approach, nucleic acid molecules are annealed to primers on a slide and amplified. Four types of fluorescent dye residues, each complementary to a native nucleobase, are added, the residue complementary to the next base in the nucleic acid sequence is added, and unincorporated dyes are rinsed from the slide. Four types of reversible terminator bases (RT-bases) are added, and non-incorporated nucleotides are washed away. Fluorescence indicates the addition of a dye residue, thus identifying the complementary base in the template sequence. The dye residue is chemically removed, and the cycle repeats.

[0451] Detection of point mutations can be accomplished by molecular cloning of the p53 allele(s) present in the cancer cell tissue and sequencing that allele(s). Alternatively, the polymerase chain reaction can be used to amplify p53 gene sequences directly from a genomic DNA preparation from the cancer cell tissue. The DNA sequence of the amplified sequences can then be determined. See e.g., Saiki et al., Science, Vol. 239, p. 487, 1988; U.S. Pat. No. 4,683,202; and U.S. Pat. No. 4,683,195. Specific deletions of p53 genes can also be detected. For example, restriction fragment length polymorphism (RFLP) probes for the p53 gene or surrounding marker genes can be used to score loss of a p53 allele.

[0452] Loss of wild type p53 genes can also be detected on the basis of the loss of a wild type expression product of the p53 gene. Such expression products include both the mRNA as well as the p53 protein product itself. Point mutations can be detected by sequencing the mRNA directly or via molecular cloning of cDNA made from the mRNA. The sequence of the cloned cDNA can be determined using DNA sequencing techniques. The cDNA can also be sequenced via the polymerase chain reaction (PCR).

[0453] Alternatively, mismatch detection can be used to detect point mutations in the p53 gene or the mRNA product. The method can involve the use of a labeled riboprobe that is complementary to the human wild type p53 gene. The riboprobe and either mRNA or DNA isolated from the cancer cell tissue are annealed (hybridized) together and subsequently digested with the enzyme RNase A which is able to detect some mismatches in a duplex RNA structure. If a mismatch is detected by RNase A, the enzyme cleaves at the site of the mismatch. Thus, when the annealed RNA preparation is separated on an electrophoretic gel matrix, if a mismatch has been detected and cleaved by RNase A, an RNA product is seen that is smaller than the full-length duplex RNA for the riboprobe and the p53 mRNA or DNA. The riboprobe need not be the full length of the p53 mRNA or gene but can be a segment of either. If the riboprobe comprises only a segment of the p53 mRNA or gene it will be desirable to use a number of these probes to screen the whole mRNA sequence for mismatches.

[0454] In similar fashion, DNA probes can be used to detect mismatches, through enzymatic or chemical cleavage. See, e.g., Cotton et al., Proc. Natl. Acad. Sci. USA, vol. 85, 4397, 1988; and Shenk et al., Proc. Natl. Acad. Sci. USA, vol. 72, p. 989, 1975. Alternatively, mismatches can be detected by shifts in the electrophoretic mobility of mismatched duplexes relative to matched duplexes. See, e.g., Cariello, Human Genetics, vol. 42, p. 726, 1988. With either riboprobes or DNA probes, the cellular mRNA or DNA which might contain a mutation can be amplified using PCR (see below) before hybridization.

[0455] DNA sequences of the p53 gene from the cancer cell tissue which have been amplified by use of polymerase chain reaction can also be screened using allele-specific probes. These probes are nucleic acid oligomers, each of which contains a region of the p53 gene sequence harboring a known mutation. For example, one oligomer can be about 30 nucleotides in length, corresponding to a portion of the p53 gene sequence. At the position coding for the 175th codon of p53 gene the oligomer encodes an alanine, rather than the wild type codon valine. By use of a battery of such allele-specific probes, the PCR amplification products can be screened to identify the presence of a previously identified mutation in the p53 gene. Hybridization of allele-specific probes with amplified p53 sequences can be performed, for example, on a nylon filter. Hybridization to a particular probe indicates the presence of the same mutation in the cancer cell tissue as in the allele-specific probe.

[0456] The identification of p53 gene structural changes in cancer cells can be facilitated through the application of a diverse series of high resolution, high throughput microarray platforms. Essentially two types of array include those that carry PCR products from cloned nucleic acids (e.g. cDNA, BACs, cosmids) and those that use oligonucleotides. The methods can provide a way to survey genome wide DNA copy number abnormalities and expression levels to allow correlations between losses, gains and amplifications in cancer cells with genes that are over- and under-expressed in the same samples. The gene expression arrays that provide estimates of mRNA levels in cancer cells have given rise to exon-specific arrays that can identify both gene expression levels, alternative splicing events and mRNA processing alterations.

[0457] Oligonucleotide arrays can be used to interrogate single nucleotide polymorphisms (SNPs) throughout the genome for linkage and association studies and these have been adapted to quantify copy number abnormalities and loss of heterozygosity events. DNA sequencing arrays can allow resequencing of chromosome regions and whole genomes.

[0458] SNP-based arrays or other gene arrays or chips can determine the presence of wild type p53 allele and the structure of mutations. A single nucleotide polymorphism (SNP), a variation at a single site in DNA, is the most frequent type of variation in the genome. For example, there are an estimated 5-10 million SNPs in the human genome. SNPs can be synonymous or nonsynonymous substitutions. Synonymous SNP substitutions do not result in a change of amino acid in the protein due to the degeneracy of the genetic code, but can affect function in other ways. For example, a seemingly silent mutation in gene that codes for a membrane transport protein can slow down translation, allowing the peptide chain to misfold, and produce a less functional mutant membrane transport protein. Nonsynonymous SNP substitutions can be missense substitutions or nonsense substitutions. Missense substitutions occur when a single base change results in change in amino acid sequence of the protein and malfunction thereof leads to disease. Nonsense substitutions occur when a point mutation results in a premature stop codon, or a nonsense codon in the transcribed mRNA, which results in a truncated and usually, nonfunctional, protein product. As SNPs are highly conserved throughout evolution and within a population, the map of SNPs serves as an excellent genotypic marker for research. SNP array is a useful tool to study the whole genome.

[0459] In addition, SNP array can be used for studying the Loss Of Heterozygosity (LOH). LOH is a form of allelic imbalance that can result from the complete loss of an allele or from an increase in copy number of one allele relative to the other. While other chip-based methods (e.g., comparative genomic hybridization can detect only genomic gains or deletions), SNP array has the additional advantage of detecting copy number neutral LOH due to uniparental disomy (UPD). In UPD, one allele or whole chromosome from one parent are missing leading to reduplication of the other parental allele (uni-parental=from one parent, disomy=duplicated). In a disease setting this occurrence can be pathologic when the wild type allele (e.g., from the mother) is missing and instead two copies of the heterozygous allele (e.g., from the father) are present. This usage of SNP array has a huge potential in cancer diagnostics as LOH is a prominent characteristic of most human cancers. SNP array technology have shown that cancers (e.g. gastric cancer, liver cancer, etc.) and hematologic malignancies (ALL, MDS, CML etc) have a high rate of LOH due to genomic deletions or UPD and genomic gains. In the present disclosure, using high density SNP array to detect LOH allows identification of pattern of allelic imbalance to determine the presence of wild type p53 allele (Lips et al., 2005; Lai et al., 2007).

[0460] Examples of p53 gene sequence and single nucleotide polymorphism arrays include p53 Gene Chip (Affymetrix, Santa Clara, Calif.), Roche p53 Ampli-Chip (Roche Molecular Systems, Pleasanton, Calif.), GeneChip Mapping arrays (Affymetrix, Santa Clara, Calif.), SNP Array 6.0 (Affymetrix, Santa Clara, Calif.), BeadArrays (Illumina, San Diego, Calif.), etc.

[0461] Mutations of wild type p53 genes can also be detected on the basis of the mutation of a wild type expression product of the p53 gene. Such expression products include both the mRNA as well as the p53 protein product itself. Point mutations can be detected by sequencing the mRNA directly or via molecular cloning of cDNA made from the mRNA. The sequence of the cloned cDNA can be determined using DNA sequencing techniques. The cDNA can also be sequenced via the polymerase chain reaction (PCR). A panel of monoclonal antibodies could be used in which each of the epitopes involved in p53 functions are represented by a monoclonal antibody. Loss or perturbation of binding of a monoclonal antibody in the panel can indicate mutational alteration of the p53 protein and thus of the p53 gene itself. Mutant p53 genes or gene products can also be detected in body samples, including, for example, serum, stool, urine, and sputum. The same techniques discussed above for detection of mutant p53 genes or gene products in tissues can be applied to other body samples.

[0462] Loss of wild type p53 genes can also be detected by screening for loss of wild type p53 protein function. Although all of the functions which the p53 protein undoubtedly possesses have yet to be elucidated, at least two specific functions are known. Protein p53 binds to the SV40 large T antigen as well as to the adenovirus E1B antigen. Loss of the ability of the p53 protein to bind to either or both of these antigens indicates a mutational alteration in the protein which reflects a mutational alteration of the gene itself. Alternatively, a panel of monoclonal antibodies could be used in which each of the epitopes involved in p53 functions are represented by a monoclonal antibody. Loss or perturbation of binding of a monoclonal antibody in the panel would indicate mutational alteration of the p53 protein and thus of the p53 gene itself. Any method for detecting an altered p53 protein can be used to detect loss of wild type p53 genes.

[0463] Determination of the lack of p53 deactivating mutation and/or expression of wild type p53 in the subject with cancer can be performed before, during, or after the administration of the peptidomimetic macrocycles. In some embodiments, the determination of the lack of a p53 deactivating mutation and/or expression of wild type p53 is performed before the first administration of the peptidomimetic macrocycle to the subject, for example about 5 years-about 1 month, about 4 years-about 1 month, about 3 years-1 month, about 2 years-about 1 month, about 1 years-about 1 month, about 5 years-about 1 week, about 4 years-about 1 week, about 3 years-about 1 month, about 2 years-about 1 week, about 1 year-about 1 week, about 5 years-about 1 day, about 4 years-about 1 day, about 3 years-about 1 day, about 2 years-about 1 day, about 1 year-about 1 day, about 15 months-about 1 month, about 15 months-about 1 week, about 15 months-about 1 day, about 12 months-about 1 month, about 12 months-about 1 week, about 12 months-about 1 day, about 6 months-1 about month, about 6 months-about 1 week, about 6 months-about 1 day, about 3 months-1 about month, about 3 months-about 1 week, or about 3 months-about 1 day prior to the first administration of the peptidomimetic macrocycle to the subject. In some examples, the confirmation of the lack of the p53 deactivating mutation and/or expression of wild type p53 is performed up to 6 years, 5 years, 4 years, 3 years, 24 months, 23 months, 22 months, 21 months, 20 months, 19 months, 18 months, 17 months, 16 months, 15 months, 14 months, 13 months, 12 months, 11 months, 10 months, 9 months, 8 months, 7 months, 6 months, 5 months, 4 months, 3 months, 2 months, 1 months, 4 weeks (28 days), 3 weeks (21 days), 2 weeks (14 days), 1 week (7 days), 6 days, 5 days, 4 days, 3 days, 2 days or 1 day before the first administration of the peptidomimetic macrocycle to the subject. In some examples the confirmation of the lack of the p53 deactivating mutation is performed within 1 month of the first administration of the peptidomimetic macrocycle to the subject. In some examples the confirmation of the lack of the p53 deactivating mutation is performed within 21 days of the first administration of the peptidomimetic macrocycle to the subject.

### Cancers

[0464] Solid cancers that can be treated by the instant methods include, but are not limited to, bone tumors (e.g. osteosarcoma, chondroblastoma, chondrosarcoma, Ewing sarcoma), germ cell tumors, renal tumors (e.g. Wilms tumor, malignant rhabdoid tumor), liver tumors (e.g. hepatoblastoma and hepatocellular carcinoma), neuroblastoma, melanoma, adrenocortical carcinoma, nasopharyngeal carcinoma, thyroid carcinoma, retinoblastoma, sarcomas and soft tissue tumors (e.g., rhabdomyosarcoma, desmoid tumor, fibrosarcoma, liposarcoma, malignant fibrous histiocytoma, and peripheral nerve sheath tumor (neurofibrosarcoma).

[0465] Liquid cancers that can be treated by the instant methods include, but are not limited to, lymphomas, leukemias, and myelomas. Examples of lymphomas and leukemias that can be treated in accordance with the methods described include, but are not limited to, chronic lymphocytic leukemia/small lymphocytic lymphoma, B-cell prolymphocytic leukemia, lymphoplasmacytic lymphoma (such as waldenstrom macroglobulinemia), splenic marginal zone lymphoma, plasma cell myeloma, plasmacytoma, monoclonal immunoglobulin deposition diseases, heavy chain diseases, extranodal marginal zone B cell lymphoma, also called malt lymphoma, nodal marginal zone B cell lymphoma (nmzl), follicular lymphoma, mantle cell lymphoma, diffuse large B cell lymphoma, mediastinal (thymic) large B cell lymphoma, intravascular large B cell lymphoma, primary effusion lymphoma, burkitt lymphoma/leukemia, T cell prolymphocytic leukemia, T cell large granular lymphocytic leukemia, aggressive NK cell leukemia, adult T cell leukemia/lymphoma, extranodal NK/T cell lymphoma, nasal type, enteropathy-type T cell lymphoma, hepatosplenic T cell lymphoma, blastic NK cell lymphoma, mycosis fungoides/sezary syndrome, primary cutaneous CD30-positive T cell lymphoproliferative disorders, primary cutaneous anaplastic large cell lymphoma, lymphomatoid papulosis, angioimmunoblastic T cell lymphoma, peripheral T cell lymphoma, unspecified, anaplastic large cell lymphoma, classical Hodgkin lymphomas (nodular sclerosis, mixed cellularity, lymphocyte-rich, lymphocyte depleted or not depleted), and nodular lymphocyte-predominant Hodgkin lymphoma.

[0466] Examples of cancers that can be treated by the methods of the disclosure include cancers involving hyperplastic/neoplastic cells of hematopoietic origin, e.g., arising from myeloid, lymphoid or erythroid lineages, or precursor cells thereof. Examples of disorders include: acute leukemias, e.g., erythroblastic leukemia and acute megakaryoblastic leukemia. Additional exemplary myeloid disorders include, but are not limited to, acute promyeloid leukemia (APML), acute myelogenous leukemia (AML) and chronic myelogenous leukemia (CML) (reviewed in Vaickus, L. (1991) Crit Rev. in Oncol./Hemotol. 11:267-97); lymphoid malignancies include, but are not limited to acute lymphoblastic leukemia (ALL) which includes B-lineage ALL and T-lineage ALL, chronic lymphocytic leukemia (CLL), prolymphocytic leukemia (PLL), multiple mylenoma, hairy cell leukemia (HLL) and Waldenstrom's macroglobulinemia (WM). Additional forms of malignant lymphomas include, but are not limited to non-Hodgkin lymphoma and variants thereof, peripheral T cell lymphomas, adult T cell leukemia/lymphoma (ATL), cutaneous T-cell lymphoma (CTCL), large granular lymphocytic leukemia (LGF), Hodgkin's disease and Reed-Sternberg disease. For example, cancers include, but are not limited to, acute lymphocytic leukemia (ALL); T-cell acute lymphocytic leukemia (T-ALL); anaplastic large cell lymphoma (ALCL); chronic myelogenous leukemia (CML); acute myeloid leukemia (AML); B-cell chronic lymphocytic leukemia (B-CLL); diffuse large B-cell lymphomas (DLBCL); hyper eosinophilia/chronic eosinophilia; and Burkitt's lymphoma.

[0467] In some embodiments, the cancer treated by the methods of the disclosure is an acute lymphoblastic leukemia; acute myeloid leukemia; AIDS-related cancers; AIDS-related lymphoma; chronic lymphocytic leukemia; chronic myelogenous leukemia; chronic myeloproliferative disorders; cutaneous T-cell lymphoma; Hodgkin lymphoma; multiple myeloma; multiple myeloma/plasma cell neoplasm; Non-Hodgkin lymphoma; primary central nervous system (CNS) lymphoma; or T-cell lymphoma; In various embodiments, the cancer can be B-Cell Chronic Lymphocytic Leukemia, B-Cell Lymphoma-DLBCL, B-Cell Lymphoma-DLBCL-germinal center-like, B-Cell Lymphoma-DLBCL-activated B-cell-like, or Burkitt's lymphoma.

[0468] In some embodiments cancers treated by the methods disclosed herein exclude cancers that are known to be associated with HPV (human papillomavirus).

[0469] The effectiveness and/or response of cancer treatment by the methods disclosed herein can be determined by any suitable method. The response can be a complete response, and which can be an objective response, a clinical response, or a pathological response to treatment. For example, the response can be determined based upon the techniques for evaluating response to treatment of cancers as described in or by Revised International Working Group Response Criteria for lymphoma patients (IWG 2014), which is hereby incorporated by reference in its entirety. The response can be a duration of survival (or probability of such duration) or progression-free interval. The timing or duration of such events can be determined from about the time of diagnosis, or from about the time treatment is initiated or from about the time treatment is finished (like the final administration of the peptidomimetic macrocycle). Alternatively, the response can be based upon a reduction in the number of cancer cells, the number of cancer cells per unit volume, or cancer cell metabolism, or based upon cancer cell burden, or based upon levels of serum markers especially where elevated in the disease state.

[0470] The response in individual patients can be characterized as a complete response, a partial response, stable disease, and progressive disease. In some embodiments, the response is complete response (CR). Complete response, in some examples can be defined as disappearance of all circulating tumor cells (CTC) or a mononuclear blood cells (MNBC) i.e. any pathological lymph nodes (whether target or non-target) must have reduction in short axis to <10 mm. In certain embodiments, the response is a partial response (PR). Partial response can be defined to mean at least 30% decrease in the sum of diameters of circulating tumor cells (CTC) or a mononuclear blood cells (MNBC), taking as reference the baseline sum diameters. In some embodiments, the response is progressive disease (PD). Progressive disease can be defined as at least a 20% increase in the number of circulating tumor cells (CTC) or a mononuclear blood cells (MNBC), taking as reference the smallest number on study (this includes the baseline number if that is the smallest) and an absolute increase of at least 1, at least 2, at least 3, at least 4, at least 5, at least 6, at least 7, at least 8, at least 9, at least 10, at least 11, at least 12, at least 13, at least 14, at least 15, at least 16, at least 17, at least 18, at least 19, at least 20, at least 30, at least 40, at least 50, or at least 100 or more circulating tumor cells (CTC) or a mononuclear blood cells (MNBC). The appearance of one or more new lesions can also be considered as progression. In some embodiments, the disease can be stable disease (SD). Stable disease can be characterized by neither sufficient decrease in cancer cell number to qualify for PR nor sufficient increase to qualify for PD, taking as reference the smallest number of CTCs and/or MNBCs while on study. In certain embodiments, the response is a pathological complete response. A pathological complete response, e.g., as determined by a pathologist following examination of tissue removed at the time of surgery or biopsy, generally refers to an absence of histological evidence of invasiveand/or non-invasive cancer cells in the surgical specimen.

### Combination Treatment

[0471] Also provided herein are combination therapies for the treatment of a cancer which involve the administration of the peptidomimetic macrocycles disclosed herein in combination with one or more additional therapies to a subject with cancer determined to lack a p53 deactivating mutation and/or express wild type p53. In a specific embodiment, presented herein are combination therapies for the treatment of cancer which involve the administration of an effective amount of the peptidomimetic macrocycles in combination with an effective amount of another therapy to a subject with a cancer determined to lack a p53 deactivating mutation and/or with a cancer expressing wild type p53.

[0472] As used herein, the term “in combination,” refers, in the context of the administration of the peptidomimetic macrocycles, to the administration of the peptidomimetic macrocycles prior to, concurrently with, or subsequent to the administration of one or more additional therapies (e.g., agents, surgery, or radiation) for use in treating cancer. The use of the term “in combination” does not restrict the order in which the peptidomimetic macrocycles and one or more additional therapies are administered to a subject. In specific embodiments, the interval of time between the administration of the peptidomimetic macrocycles and the administration of one or more additional therapies can be about 1-about 5 minutes, about 1-about 30 minutes, about 30 minutes to about 60 minutes, about 1 hour, about 1-about 2 hours, about 2-about 6 hours, about 2-about 12 hours, about 12-about 24 hours, about 1-about 2 days, about 2 days, about 3 days, about 4 days, about 5 days, about 6 days, about 7 days, about 1 week, about 2 weeks, about 3 weeks, about 4 weeks, about 5 weeks, about 6 weeks, about 7 weeks, about 8 weeks, about 9 weeks, about 10 weeks, about 15 weeks, about 20 weeks, about 26 weeks, about 52 weeks, about 11-about 15 weeks, about 15-about 20 weeks, about 20-about 30 weeks, about 30-about 40 weeks, about 40-about 50 weeks, about 1 month, about 2 months, about 3 months, about 4 months, about 5 months, about 6 months, about 7 months, about 8 months, about 9 months, about 10 months, about 11 months, about 12 months, about 1 year, about 2 years, or any period of time in between. In certain embodiments, the peptidomimetic macrocycles and one or more additional therapies are administered less than 1 day, less than 1 week, less than 2 weeks, less than 3 weeks, less than 4 weeks, less than one month, less than 2 months, less than 3 months, less than 6 months, less than 1 year, less than 2 years, or less than 5 years apart.

[0473] In some embodiments, the combination therapies provided herein involve administering of the peptidomimetic macrocycles 1-2 times a week, once every week, once every 2 weeks, once every 3 weeks, once every 4 weeks, once every 5 weeks, once every 6 weeks, once every 7 weeks or once every 8 weeks and administering one or more additional therapies once a week, once every 2 weeks, once every 3 weeks, once every 4 weeks, once every month, once every 2 months (e.g., approximately 8 weeks), once every 3 months (e.g., approximately 12 weeks), or once every 4 months (e.g., approximately 16 weeks). In certain embodiments, the peptidomimetic macrocycles and one or more additional therapies are cyclically administered to a subject. Cycling therapy involves the administration of the peptidomimetic macrocycles compounds for a period of time, followed by the administration of one or more additional therapies for a period of time, and repeating this sequential administration. In certain embodiments, cycling therapy can also include a period of rest where the peptidomimetic macrocycles or the additional therapy is not administered for a period of time (e.g., 2 days, 3 days, 4 days, 5 days, 6 days, 7 days, 1 week, 2 weeks, 3 weeks, 4 weeks, 5 weeks, 10 weeks, 20 weeks, 1 month, 2 months, 3 months, 4 months, 5 months, 6 months, 7 months, 8 months, 9 months, 10 months, 11 months, 12 months, 2 years, or 3 years). In an embodiment, the number of cycles administered is from 1 to 12 cycles, from 2 to 10 cycles, or from 2 to 8 cycles.

[0474] In some embodiments, the methods for treating cancer provided herein comprise administering the peptidomimetic macrocycles as a single agent for a period of time prior to administering the peptidomimetic macrocycles in combination with an additional therapy. In certain embodiments, the methods for treating cancer provided herein comprise administering an additional therapy alone for a period of time prior to administering the peptidomimetic macrocycles in combination with the additional therapy.

[0475] In some embodiments, the administration of the peptidomimetic macrocycles and one or more additional therapies in accordance with the methods presented herein have an additive effect relative the administration of the peptidomimetic macrocycles or said one or more additional therapies alone. In some embodiments, the administration of the peptidomimetic macrocycles and one or more additional therapies in accordance with the methods presented herein have a synergistic effect relative to the administration of the peptidomimetic macrocycles or said one or more additional therapies alone.

[0476] As used herein, the term “synergistic,” refers to the effect of the administration of the peptidomimetic macrocycles in combination with one or more additional therapies (e.g., agents), which combination is more effective than the additive effects of any two or more single therapies (e.g., agents). In a specific embodiment, a synergistic effect of a combination therapy permits the use of lower dosages (e.g., sub-optimal doses) of the peptidomimetic macrocycles or an additional therapy and/or less frequent administration of the peptidomimetic macrocycles or an additional therapy to a subject. In certain embodiments, the ability to utilize lower dosages of the peptidomimetic macrocycles or of an additional therapy and/or to administer the peptidomimetic macrocycles or said additional therapy less frequently reduces the toxicity associated with the administration of the peptidomimetic macrocycles or of said additional therapy, respectively, to a subject without reducing the efficacy of the peptidomimetic macrocycles or of said additional therapy, respectively, in the treatment of cancer. In some embodiments, a synergistic effect results in improved efficacy of the peptidomimetic macrocycles and each of said additional therapies in treating cancer. In some embodiments, a synergistic effect of a combination of the peptidomimetic macrocycles and one or more additional therapies avoids or reduces adverse or unwanted side effects associated with the use of any single therapy.

[0477] The combination of the peptidomimetic macrocycles and one or more additional therapies can be administered to a subject in the same pharmaceutical composition. Alternatively, the peptidomimetic macrocycles and one or more additional therapies can be administered concurrently to a subject in separate pharmaceutical compositions. The peptidomimetic macrocycles and one or more additional therapies can be administered sequentially to a subject in separate pharmaceutical compositions. The peptidomimetic macrocycles compounds and one or more additional therapies can also be administered to a subject by the same or different routes of administration.

[0478] The combination therapies provided herein involve administering to a subject to in need thereof the peptidomimetic macrocycles in combination with conventional, or known, therapies for treating cancer. Other therapies for cancer or a condition associated therewith are aimed at controlling or relieving one or more symptoms. Accordingly, in some embodiments, the combination therapies provided herein involve administering to a subject to in need thereof a pain reliever, or other therapies aimed at alleviating or controlling one or more symptoms associated with or a condition associated therewith.

[0479] Non-limiting specific examples of anti-cancer agents that can be used in combination with the peptidomimetic macrocycles include: a hormonal agent (e.g., aromatase inhibitor, selective estrogen receptor modulator (SERM), and estrogen receptor antagonist), chemotherapeutic agent (e.g., microtubule disassembly blocker, antimetabolite, topoisomerase inhibitor, and DNA crosslinker or damaging agent), anti-antigenic agent (e.g., VEGF antagonist, receptor antagonist, integrin antagonist, vascular targeting agent (VTA)/vascular disrupting agent (VDA)), radiation therapy, and conventional surgery.

[0480] Non-limiting examples of hormonal agents that can be used in combination with the peptidomimetic macrocycles include aromatase inhibitors, SERMs, and estrogen receptor antagonists. Hormonal agents that are aromatase inhibitors can be steroidal or no steroidal. Non-limiting examples of no steroidal hormonal agents include letrozole, anastrozole, aminoglutethimide, fadrozole, and vorozole. Non-limiting examples of steroidal hormonal agents include aromasin (exemestane), formestane, and testolactone. Non-limiting examples of hormonal agents that are SERMs include tamoxifen (branded/marketed as Nolvadex®), afimoxifene, arzoxifene, bazedoxifene, clomifene, femarelle, lasofoxifene, ormeloxifene, raloxifene, and toremifene. Non-limiting examples of hormonal agents that are estrogen receptor antagonists include fulvestrant. Other hormonal agents include but are not limited to abiraterone and lonaprisan.

[0481] Non-limiting examples of chemotherapeutic agents that can be used in combination with of peptidomimetic macrocycles include microtubule disassembly blocker, antimetabolite, topoisomerase inhibitor, and DNA crosslinker or damaging agent. Chemotherapeutic agents that are microtubule disassembly blockers include, but are not limited to, taxanes (e.g., paclitaxel (branded/marketed as TAXOL®), docetaxel, abraxane, larotaxel, ortataxel, and tesetaxel); epothilones (e.g., ixabepilone); and vinca alkaloids (e.g., vinorelbine, vinblastine, vindesine, and vincristine (branded/marketed as ONCOVIN®)).

[0482] Chemotherapeutic agents that are antimetabolites include, but are not limited to, folate anitmetabolites (e.g., methotrexate, aminopterin, pemetrexed, raltitrexed); purine antimetabolites (e.g., cladribine, clofarabine, fludarabine, mercaptopurine, pentostatin, thioguanine); pyrimidine antimetabolites (e.g., 5-fluorouracil, capcitabine, gemcitabine (GEMZAR®), cytarabine, decitabine, floxuridine, tegafur); and deoxyribonucleotide antimetabolites (e.g., hydroxyurea).

[0483] Chemotherapeutic agents that are topoisomerase inhibitors include, but are not limited to, class I (camptotheca) topoisomerase inhibitors (e.g., topotecan (branded/marketed as HYCAMTIN®) irinotecan, rubitecan, and belotecan); class II (podophyllum) topoisomerase inhibitors (e.g., etoposide or VP-16, and teniposide); anthracyclines (e.g., doxorubicin, epirubicin, Doxil, aclarubicin, amrubicin, daunorubicin, idarubicin, pirarubicin, valrubicin, and zorubicin); and anthracenediones (e.g., mitoxantrone, and pixantrone).

[0484] Chemotherapeutic agents that are DNA crosslinkers (or DNA damaging agents) include, but are not limited to, alkylating agents (e.g., cyclophosphamide, mechlorethamine, Ifosfamide (branded/marketed as IFEX®), trofosfamide, chlorambucil, melphalan, prednimustine, bendamustine, uramustine, estramustine, carmustine (branded/marketed as BiCNU®), lomustine, semustine, fotemustine, nimustine, ranimustine, streptozocin, busulfan, mannosulfan, treosulfan, carboquone, N,N′N′-triethylenethiophosphoramide, triaziquone, triethylenemelamine); alkylating-like agents (e.g., carboplatin (branded/marketed as PARAPLATIN®), cisplatin, oxaliplatin, nedaplatin, triplatin tetranitrate, satraplatin, picoplatin); nonclassical DNA crosslinkers (e.g., procarbazine, dacarbazine, temozolomide (branded/marketed as TEMODAR®), altretamine, mitobronitol); and intercalating agents (e.g., actinomycin, bleomycin, mitomycin, and plicamycin).

[0485] Non-limiting examples of other therapies that can be administered to a subject in combination with the peptidomimetic macrocycles include: (1) a statin such as lovostatin (e.g., branded/marketed as MEVACOR®); (2) an mTOR inhibitor such as sirolimus which is also known as Rapamycin (e.g., branded/marketed as RAPAMUNE®), temsirolimus (e.g., branded/marketed as TORISEL®), evorolimus (e.g., branded/marketed as AFINITOR®), and deforolimus; (3) a farnesyltransferase inhibitor agent such as tipifarnib; (4) an antifibrotic agent such as pirfenidone; (5) a pegylated interferon such as PEG-interferon alfa-2b; (6) a CNS stimulant such as methylphenidate (branded/marketed as RITALIN®); (7) a HER-2 antagonist such as anti-HER-2 antibody (e.g., trastuzumab) and kinase inhibitor (e.g., lapatinib); (8) an IGF-1 antagonist such as an anti-IGF-1 antibody (e.g., AVE1642 and IMC-A11) or an IGF-1 kinase inhibitor; (9) EGFR/HER-1 antagonist such as an anti-EGFR antibody (e.g., cetuximab, panitumamab) or EGFR kinase inhibitor (e.g., erlotinib; gefitinib); (10) SRC antagonist such as bosutinib; (11) cyclin dependent kinase (CDK) inhibitor such as seliciclib; (12) Janus kinase 2 inhibitor such as lestaurtinib; (13) proteasome inhibitor such as bortezomib; (14) phosphodiesterase inhibitor such as anagrelide; (15) inosine monophosphate dehydrogenase inhibitor such as tiazofurine; (16) lipoxygenase inhibitor such as masoprocol; (17) endothelin antagonist; (18) retinoid receptor antagonist such as tretinoin or alitretinoin; (19) immune modulator such as lenalidomide, pomalidomide, or thalidomide; (20) kinase (e.g., tyrosine kinase) inhibitor such as imatinib, dasatinib, erlotinib, nilotinib, gefitinib, sorafenib, sunitinib, lapatinib, or TG100801; (21) non-steroidal anti-inflammatory agent such as celecoxib (branded/marketed as CELEBREX®); (22) human granulocyte colony-stimulating factor (G-CSF) such as filgrastim (branded/marketed as NEUPOGEN®); (23) folinic acid or leucovorin calcium; (24) integrin antagonist such as an integrin α5β1-antagonist (e.g., JSM6427); (25) nuclear factor kappa beta (NF-κβ) antagonist such as OT-551, which is also an anti-oxidant. (26) hedgehog inhibitor such as CUR61414, cyclopamine, GDC-0449, and anti-hedgehog antibody; (27) histone deacetylase (HDAC) inhibitor such as SAHA (also known as vorinostat (branded/marketed as ZOLINZA)), PCI-24781, SB939, CHR-3996, CRA-024781, ITF2357, JNJ-26481585, or PCI-24781; (28) retinoid such as isotretinoin (e.g., branded/marketed as ACCUTANE®); (29) hepatocyte growth factor/scatter factor (HGF/SF) antagonist such as HGF/SF monoclonal antibody (e.g., AMG 102); (30) synthetic chemical such as antineoplaston; (31) anti-diabetic such as rosaiglitazone (e.g., branded/marketed as AVANDIA®); (32) antimalarial and amebicidal drug such as chloroquine (e.g., branded/marketed as ARALEN®); (33) synthetic bradykinin such as RMP-7; (34) platelet-derived growth factor receptor inhibitor such as SU-101; (35) receptor tyrosine kinase inhibitorsof Flk-1/KDR/VEGFR2, FGFR1 and PDGFR beta such as SU5416 and SU6668; (36) anti-inflammatory agent such as sulfasalazine (e.g., branded/marketed as AZULFIDINE®); and (37) TGF-beta antisense therapy.

[0486] In some embodiments the peptidomimetic macrocycles disclosed herein can inhibit one or more transporter enzymes (e.g., OATP1B1, OATP1B3, BSEP) at concentrations that can be clinically relevant. Therefore the peptidomimetic macrocycles disclosed herein can interact with medications that are predominantly cleared by hepatobiliary transporters. In particular, methotrexate and statins (e.g., atorvastatin, fluvastatin lovastatin, pitavastatin pravastatin, rosuvastatin and simvastatin) can not be dosed within 48 h, 36 h, 24 h, or 12 h ((for example within 24 h) of the administration of the peptidomimetic macrocycles disclosed herein. Examples of medications that can be affected by co-administration with peptidomimetic macrocycles disclosed herein are listed below. In various embodiments one or more of the medications selected from Table 8 is not dosed within 48 h, 36 h, 24 h, or 12 h (for example within 24 h) of the administration of the peptidomimetic macrocycles disclosed herein.

[0487] Example medications that can be affected by co-administration with peptidomimetic macrocycles disclosed in Table 8.

TABLE 8

| Medication | Therapeutic Area |
|---|---|
| Irinotecan | Oncology |
| Bosentan | Pulmonary artery hypertension |
| Caspofungin | Antifungal |
| Methotrexate | Oncology & rheumatology |
| Repaglinide | Diabetes mellitus |
| Atorvastatin | Hypercholesterolemia |
| Cerivastatin | Hypercholesterolemia |
| Fluvastatin | Hypercholesterolemia |
| Lovastatin | Hypercholesterolemia |
| Pitavastatin | Hypercholesterolemia |
| Pravastatin | Hypercholesterolemia |
| Rosuvastatin | Hypercholesterolemia |
| Simvastatin | Hypercholesterolemia |

### EXAMPLES

### Example 1. Synthesis of 6-Chlorotryptophan Fmoc Amino Acids

[chemical structure]

[0489] Tert-butyl 6-chloro-3-formyl-1H-indole-1-carboxylate, 1. To a stirred solution of dry DMF (12 mL) was added dropwise POCl₃ (3.92 mL, 43 mmol, 1.3 equiv) at 0° C. under Argon. The solution was stirred at the same temperature for 20 min before a solution of 6-chloroindole (5.0 g, 33 mmol, 1 eq.) in dry DMF (30 mL) was added dropwise. The resulting mixture was allowed to warm to room temperature and stirred for an additional 2.5 h. Water (50 mL) was added and the solution was neutralized with 4M aqueous NaOH (pH˜8). The resulting solid was filtered off, washed with water and dried under vacuum. This material was directly used in the next step without additional purification. To a stirred solution of the crude formyl indole (33 mmol, 1 eq.) in THF (150 mL) was added successively Boc₂O (7.91 g, 36.3 mmol, 1.1 equiv) and DMAP (0.4 g, 3.3 mmol, 0.1 equiv) at room temperature under N₂. The resulting mixture was stirred at room temperature for 1.5 h and the solvent was evaporated under reduced pressure. The residue was taken up in EtOAc and washed with 1N HCl, dried and concentrated to give the formyl indole 1 (9 g, 98% over 2 steps) as a white solid. ¹H NMR (CDCl₃) δ: 1.70 (s, Boc, 9H); 7.35 (dd, 1H); 8.21 (m, 3H); 10.07 (s, 1H).

[0490] Tert-butyl 6-chloro-3-(hydroxymethyl)-1H-indole-1-carboxylate, 2. To a solution of compound 1 (8.86 g, 32 mmol, 1 eq.) in ethanol (150 mL) was added NaBH₄ (2.4 g, 63 mmol, 2 eq.). The reaction was stirred for 3 h at room temperature. The reaction mixture was concentrated and the residue was poured into diethyl ether and water. The organic layer was separated, dried over magnesium sulfate and concentrated to give a white solid (8.7 g, 98%). This material was directly used in the next step without additional purification. ¹H NMR (CDCl₃) δ: 1.65 (s, Boc, 9H); 4.80 (s, 2H, CH₂); 7.21 (dd, 1H); 7.53 (m, 2H); 8.16 (bs, 1H).

[0491] Tert-butyl 3-(bromomethyl)-6-chloro-1H-indole-1-carboxylate, 3. To a solution of compound 2 (4.1 g, 14.6 mmol, 1 eq.) in dichloromethane (50 mL) under argon was added a solution of triphenylphosphine (4.59 g, 17.5 mmol, 1.2 eq.) in dichloromethane (50 mL) at −40° C. The reaction solution was stirred an additional 30 min at 40° C. Then NBS (3.38 g, 19 mmol, 1.3 eq.) was added. The resulting mixture was allowed to warm to room temperature and stirred overnight. Dichloromethane was evaporated, Carbon Tetrachloride (100 mL) was added and the mixture was stirred for 1h and filtrated. The filtrate was concentrated, loaded in a silica plug and quickly eluted with 25% EtOAc in Hexanes. The solution was concentrated to give a white foam (3.84 g, 77%). ¹H NMR (CDCl₃) δ: 1.66 (s, Boc, 9H); 4.63 (s, 2H, CH₂); 7.28 (dd, 1H); 7.57 (d, 1H); 7.64 (bs, 1H); 8.18 (bs, 1H).

[0492] αMe-6Cl-Trp(Boc)-Ni—S-BPB, 4. To S-A1α-Ni—S-BPB (2.66 g, 5.2 mmol, 1 eq.) and KO-tBu (0.87 g, 7.8 mmol, 1.5 eq.) was added 50 mL of DMF under argon. The bromide derivative compound 3 (2.68 g, 7.8 mmol, 1.5 eq.) in solution of DMF (5.0 mL) was added via syringe. The reaction mixture was stirred at ambient temperature for 1 h. The solution was then quenched with 5% aqueous acetic acid and diluted with water. The desired product was extracted in dichloromethane, dried and concentrated. The oily product 4 was purified by flash chromatography (solid loading) on normal phase using EtOAc and Hexanes as eluents to give a red solid (1.78 g, 45% yield). αMe-6Cl-Trp(Boc)-Ni—S-BPB, 4: M+H calc. 775.21, M+H obs. 775.26; ¹H NMR (CDCl₃) δ: 1.23 (s, 3H, αMe); 1.56 (m, 11H, Boc+CH₂); 1.82-2.20 (m, 4H, 2CH₂); 3.03 (m, 1H, CH_{α}); 3.24 (m, 2H, CH₂); 3.57 and 4.29 (AB system, 2H, CH₂ (benzyl), J=12.8 Hz); 6.62 (d, 2H); 6.98 (d, 1H); 7.14 (m, 2H); 7.23 (m, 1H); 7.32-7.36 (m, 5H); 7.50 (m, 2H); 7.67 (bs, 1H); 7.98 (d, 2H); 8.27 (m, 2H).

[0493] Fmoc-αMe-6Cl-Trp(Boc)-OH, 6. To a solution of 3 N HCl/MeOH (1/3, 15 mL) at 50° C. was added a solution of compound 4 (1.75 g, 2.3 mmol, 1 eq.) in MeOH (5 ml) dropwise. The starting material disappeared within 3-4 h. The acidic solution was then cooled to 0° C. with an ice bath and quenched with an aqueous solution of Na₂CO₃ (1.21 g, 11.5 mmol, 5 eq.). Methanol was removed and 8 more equivalents of Na₂CO₃ (1.95 g, 18.4 mmol) were added to the suspension. The Nickel scavenging EDTA disodium salt dihydrate (1.68 g, 4.5 mmol, 2 eq.) was then added and the suspension was stirred for 2 h. A solution of Fmoc-OSu (0.84 g, 2.5 mmol, 1.1 eq.) in acetone (50 mL) was added and the reaction was stirred overnight. Afterwards, the reaction was diluted with diethyl ether and 1N HCl. The organic layer was then dried over magnesium sulfate and concentrated in vacuo. The desired product 6 was purified on normal phase using acetone and dichloromethane as eluents to give a white foam (0.9 g, 70% yield). Fmoc-αMe-6Cl-Trp(Boc)-OH, 6: M+H calc. 575.19, M+H obs. 575.37; ¹H NMR (CDCl₃) 1.59 (s, 9H, Boc); 1.68 (s, 3H, Me); 3.48 (bs, 2H, CH₂); 4.22 (m, 1H, CH); 4.39 (bs, 2H, CH₂); 5.47 (s, 1H, NH); 7.10 (m, 1H); 7.18 (m, 2H); 7.27 (m, 2H); 7.39 (m, 2H); 7.50 (m, 2H); 7.75 (d, 2H); 8.12 (bs, 1H).

[0494] 6Cl-Trp(Boc)-Ni—S-BPB, 5. To Gly-Ni—S-BPB (4.6 g, 9.2 mmol, 1 eq.) and KO-tBu (1.14 g, 10.1 mmol, 1.1 eq.) was added 95 mL of DMF under argon. The bromide derivative compound 3 (3.5 g, 4.6 mmol, 1.1 eq.) in solution of DMF (10 mL) was added via syringe. The reaction mixture was stirred at ambient temperature for 1 h. The solution was then quenched with 5% aqueous acetic acid and diluted with water. The desired product was extracted in dichloromethane, dried and concentrated. The oily product 5 was purified by flash chromatography (solid loading) on normal phase using EtOAc and Hexanes as eluents to give a red solid (5 g, 71% yield). 6Cl-Trp(Boc)-Ni—S-BPB, 5: M+H calc. 761.20, M+H obs. 761.34; ¹H NMR (CDCl₃) δ: 1.58 (m, 11H, Boc+CH₂); 1.84 (m, 1H); 1.96 (m, 1H); 2.24 (m, 2H, CH₂); 3.00 (m, 1H, CHₐ); 3.22 (m, 2H, CH₂); 3.45 and 4.25 (AB system, 2H, CH₂ (benzyl), J=12.8 Hz); 4.27 (m, 1H, CHₐ); 6.65 (d, 2H); 6.88 (d, 1H); 7.07 (m, 2H); 7.14 (m, 2H); 7.28 (m, 3H); 7.35-7.39 (m, 2H); 7.52 (m, 2H); 7.96 (d, 2H); 8.28 (m, 2H).

[0495] Fmoc-6Cl-Trp(Boc)-OH, 7. To a solution of 3N HCl/MeOH (1/3, 44 mL) at 50° C. was added a solution of compound 5 (5 g, 6.6 mmol, 1 eq.) in MeOH (10 ml) dropwise. The starting material disappeared within 3-4 h. The acidic solution was then cooled to 0° C. with an ice bath and quenched with an aqueous solution of Na₂CO₃ (3.48 g, 33 mmol, 5 eq.). Methanol was removed and 8 more equivalents of Na₂CO₃ (5.57 g, 52 mmol) were added to the suspension. The Nickel scavenging EDTA disodium salt dihydrate (4.89 g, 13.1 mmol, 2 eq.) and the suspension was stirred for 2 h. A solution of Fmoc-OSu (2.21 g, 6.55 mmol, 1.1 eq.) in acetone (100 mL) was added and the reaction was stirred overnight. Afterwards, the reaction was diluted with diethyl ether and 1N HCl. The organic layer was then dried over magnesium sulfate and concentrated in vacuo. The desired product 7 was purified on normal phase using acetone and dichloromethane as eluents to give a white foam (2.6 g, 69% yield). Fmoc-6Cl-Trp(Boc)-OH, 7: M+H calc. 561.17, M+H obs. 561.37; ¹H NMR (CDCl₃) 1.63 (s, 9H, Boc); 3.26 (m, 2H, CH₂); 4.19 (m, 1H, CH); 4.39 (m, 2H, CH₂); 4.76 (m, 1H); 5.35 (d, 1H, NH); 7.18 (m, 2H); 7.28 (m, 2H); 7.39 (m, 3H); 7.50 (m, 2H); 7.75 (d, 2H); 8.14 (bs, 1H).

[0496] Reactions from Example 1 are shown in FIG. 1.

### Example 2. Peptidomimetic Macrocycles of the Invention

[0497] Peptidomimetic macrocycles were synthesized, purified and analyzed as previously described and as described below (Schafmeister et al., J. Am. Chem. Soc. 122:5891-5892 (2000); Schafmeister & Verdin, J. Am. Chem. Soc. 122:5891 (2005); Walensky et al., Science 305:1466-1470 (2004); and U.S. Pat. No. 7,192,713). Peptidomimetic macrocycles were designed by replacing two or more naturally occurring amino acids with the corresponding synthetic amino acids. Substitutions were made at i and i+4, and i and i+7 positions. Peptide synthesis was performed either manually or on an automated peptide synthesizer (Applied Biosystems, model 433 Å), using solid phase conditions, rink amide AM resin (Novabiochem), and Fmoc main-chain protecting group chemistry. For the coupling of natural Fmoc-protected amino acids (Novabiochem), 10 equivalents of amino acid and a 1:1:2 molar ratio of coupling reagents HBTU/HOBt (Novabiochem)/DIEA were employed. Non-natural amino acids (4 equiv) were coupled with a 1:1:2 molar ratio of HATU (Applied Biosystems)/HOBt/DIEA. The N-termini of the synthetic peptides were acetylated, while the C-termini were amidated.

[0498] The fully protected resin-bound peptides are synthesized on a Rink amide MBHA resin (loading 0.62 mmol/g) on a 0.1 mmol scale. Deprotection of the temporary Fmoc group is achieved by 2×20 min treatments of the resin bound peptide with 25% (v/v) piperidine in NMP. After extensive flow washing with NMP and dichloromethane, coupling of each successive amino acid was achieved with 1×60 min incubation with the appropriate preactivated Fmoc-amino acid derivative. All protected amino acids (1 mmol) were dissolved in NMP and activated with HCTU (1 mmol) and DIEA (1 mmol) prior to transfer of the coupling solution to the deprotected resin-bound peptide. After coupling was completed, the resin was extensively flow washed in preparation for the next deprotection/coupling cycle. Acetylation of the amino terminus was carried out in the presence of acetic anhydride/DIEA in NMP/NMM. The LC-MS analysis of a cleaved and deprotected sample obtained from an aliquot of the fully assembled resin-bound peptide was accomplished in order to verifying the completion of each coupling.

[0499] Purification of cross-linked compounds was achieved by high performance liquid chromatography (HPLC) (Varian ProStar) on a reverse phase C18 column (Varian) to yield the pure compounds. Chemical composition of the pure products was confirmed by LC/MS mass spectrometry (Micromass LCT interfaced with Agilent 1100 HPLC system) and amino acid analysis (Applied Biosystems, model 420 Å).

[0500] The following protocol was used in the synthesis of dialkyne-crosslinked peptidomimetic macrocycles, including SP662, SP663 and SP664. Fully protected resin-bound peptides were synthesized on a PEG-PS resin (loading 0.45 mmol/g) on a 0.2 mmol scale. Deprotection of the temporary Fmoc group was achieved by 3×10 min treatments of the resin bound peptide with 20% (v/v) piperidine in DMF. After washing with NMP (3×), dichloromethane (3×) and NMP (3×), coupling of each successive amino acid was achieved with 1×60 min incubation with the appropriate preactivated Fmoc-amino acid derivative. All protected amino acids (0.4 mmol) were dissolved in NMP and activated with HCTU (0.4 mmol) and DIEA (0.8 mmol) prior to transfer of the coupling solution to the deprotected resin-bound peptide. After coupling was completed, the resin was washed in preparation for the next deprotection/coupling cycle. Acetylation of the amino terminus was carried out in the presence of acetic anhydride/DIEA in NMP. The LC-MS analysis of a cleaved and deprotected sample obtained from an aliquot of the fully assembled resin-bound peptide was accomplished in order to verifying the completion of each coupling. In a typical example, tetrahydrofuran (4 ml) and triethylamine (2 ml) were added to the peptide resin (0.2 mmol) in a 40 ml glass vial and shaken for 10 minutes. Pd(PPh₃)₂Cl₂ (0.014 g, 0.02 mmol) and copper iodide (0.008 g, 0.04 mmol) were then added and the resulting reaction mixture was mechanically shaken 16 hours while open to atmosphere. The diyne-cyclized resin-bound peptides were deprotected and cleaved from the solid support by treatment with TFA/H₂O/TIS (95/5/5 v/v) for 2.5 h at room temperature. After filtration of the resin the TFA solution was precipitated in cold diethyl ether and centrifuged to yield the desired product as a solid. The crude product was purified by preparative HPLC.

[0501] In a typical example, a peptide resin (0.1 mmol) was washed with DCM. Deprotection of the temporary Mmt group was achieved by 3×3 min treatments of the resin bound peptide with 2% TFA/DCM 5% TIPS, then 30 min treatments until no orange color is observed in the filtrate. In between treatments the resin was extensively flow washed with DCM. After complete removal of Mmt, the resin was washed with 5% DIEA/NMP solution 3× and considered ready for bisthioether coupling. Resin was loaded into a reaction vial. DCM/DMF 1/1 was added to the reaction vessel, followed by DIEA (2.4 eq). After mixing well for 5 minutes, 4,4′-Bis(bromomethyl)biphenyl (1.05 eq) (TCI America B1921) was added. The reaction was then mechanically agitated at room temperature overnight. Where needed, the reaction was allowed additional time to reach completion. A similar procedure may be used in the preparation of five-methylene, six-methylene or seven-methylene crosslinkers (“% c7”, “% c6”, or “% c5”).

[0502] The bisthioether resin-bound peptides were deprotected and cleaved from the solid support by treatment with TFA/H₂O/TIS (94/3/3 v/v) for 3 h at room temperature. After filtration of the resin the TFA solution was precipitated in cold diethyl ether and centrifuged to yield the desired product as a solid. The crude product was purified by preparative HPLC. Table 20 shows a list of peptidomimetic macrocycles.

[0503] The following protocol was used in the synthesis of single alkyne-crosslinked peptidomimetic macrocycles, including SP665. Fully protected resin-bound peptides were synthesized on a Rink amide MBHA resin (loading 0.62 mmol/g) on a 0.1 mmol scale. Deprotection of the temporary Fmoc group was achieved by 2×20 min treatments of the resin bound peptide with 25% (v/v) piperidine in NMP. After extensive flow washing with NMP and dichloromethane, coupling of each successive amino acid was achieved with 1×60 min incubation with the appropriate preactivated Fmoc-amino acid derivative. All protected amino acids (1 mmol) were dissolved in NMP and activated with HCTU (1 mmol) and DIEA (1 mmol) prior to transfer of the coupling solution to the deprotected resin-bound peptide. After coupling was completed, the resin was extensively flow washed in preparation for the next deprotection/coupling cycle. Acetylation of the amino terminus was carried out in the presence of acetic anhydride/DIEA in NMP/NMM. The LC-MS analysis of a cleaved and deprotected sample obtained from an aliquot of the fully assembled resin-bound peptide was accomplished in order to verifying the completion of each coupling. In a typical example, the peptide resin (0.1 mmol) was washed with DCM. Resin was loaded into a microwave vial. The vessel was evacuated and purged with nitrogen. Molybdenumhexacarbonyl (0.01 eq, Sigma Aldrich 199959) was added. Anhydrous chlorobenzene was added to the reaction vessel. Then 2-fluorophenol (1 eq, Sigma Aldrich F12804) was added. The reaction was then loaded into the microwave and held at 130° C. for 10 minutes. Reaction may need to be pushed a subsequent time for completion. The alkyne metathesized resin-bound peptides were deprotected and cleaved from the solid support by treatment with TFA/H₂O/TIS (94/3/3 v/v) for 3 h at room temperature. After filtration of the resin the TFA solution was precipitated in cold diethyl ether and centrifuged to yield the desired product as a solid. The crude product was purified by preparative HPLC.

[0504] Table 9 shows a list of peptidomimetic macrocycles of the invention prepared.

TABLE 9

| | SEQ | | Exact | | Observed |
|---|---|---|---|---|---|
| Number | ID NO: | Sequence | Mass | M + 2 | mass (m/e) |
| 1 | 42 | Ac-LSQETF$r8DLWKLL$EN-NH2 | 2068.13 | 1035.07 | 1035.36 |
| 2 | 43 | Ac-LSQETF$r8NLWKLL$QN-NH2 | 2066.16 | 1034.08 | 1034.31 |
| 3 | 44 | Ac-LSQQTF$r8NLWRLL$QN-NH2 | 2093.18 | 1047.59 | 1047.73 |
| 4 | 45 | Ac-QSQQTF$r8NLWKLL$QN-NH2 | 2080.15 | 1041.08 | 1041.31 |
| 5 | 46 | Ac-QSQQTF$r8NLWRLL$QN-NH2 | 2108.15 | 1055.08 | 1055.32 |
| 6 | 47 | Ac-QSQQTA$r8NLWRLL$QN-NH2 | 2032.12 | 1017.06 | 1017.24 |
| 7 | 48 | Ac-QAibQQTF$r8NLWRLL$QN-NH2 | 2106.17 | 1054.09 | 1054.34 |
| 8 | 49 | Ac-QSQQTFSNLWRLLPQN-NH2 | 2000.02 | 1001.01 | 1001.26 |
| 9 | 50 | Ac-QSQQTF$/r8NLWRLL$/QN-NH2 | 2136.18 | 1069.09 | 1069.37 |
| 10 | 51 | Ac-QSQAibTF$r8NLWRLL$QN-NH2 | 2065.15 | 1033.58 | 1033.71 |
| 11 | 52 | Ac-QSQQTF$r8NLWRLL$AN-NH2 | 2051.13 | 1026.57 | 1026.70 |
| 12 | 53 | Ac-ASQQTF$r8NLWRLL$QN-NH2 | 2051.13 | 1026.57 | 1026.90 |
| 13 | 54 | Ac-QSQQTF$r8ALWRLL$QN-NH2 | 2065.15 | 1033.58 | 1033.41 |
| 14 | 55 | Ac-QSQETF$r8NLWRLL$QN-NH2 | 2109.14 | 1055.57 | 1055.70 |
| 15 | 56 | Ac-RSQQTF$r8NLWRLL$QN-NH2 | 2136.20 | 1069.10 | 1069.17 |
| 16 | 57 | Ac-RSQQTF$r8NLWRLL$EN-NH2 | 2137.18 | 1069.59 | 1069.75 |
| 17 | 58 | Ac-LSQETFSDLWKLLPEN-NH2 | 1959.99 | 981.00 | 981.24 |
| 18 | 59 | Ac-QSQ$TFS$LWRLLPQN-NH2 | 2008.09 | 1005.05 | 1004.97 |
| 19 | 60 | Ac-QSQQ$FSN$WRLLPQN-NH2 | 2036.06 | 1019.03 | 1018.86 |
| 20 | 61 | Ac-QSQQT$SNL$RLLPQN-NH2 | 1917.04 | 959.52 | 959.32 |
| 21 | 62 | Ac-QSQQTF$NLW$LLPQN-NH2 | 2007.06 | 1004.53 | 1004.97 |
| 22 | 63 | Ac-RTQATF$r8NQWAibANle$TNAibTR-NH2 | 2310.26 | 1156.13 | 1156.52 |
| 23 | 64 | Ac-QSQQTF$r8NLWRLL$RN-NH2 | 2136.20 | 1069.10 | 1068.94 |
| 24 | 65 | Ac-QSQRTF$r8NLWRLL$QN-NH2 | 2136.20 | 1069.10 | 1068.94 |
| 25 | 66 | Ac-QSQQTF$r8NNleWRLL$QN-NH2 | 2108.15 | 1055.08 | 1055.44 |
| 26 | 67 | Ac-QSQQTF$r8NLWRNleL$QN-NH2 | 2108.15 | 1055.08 | 1055.84 |
| 27 | 68 | Ac-QSQQTF$r8NLWRLNle$QN-NH2 | 2108.15 | 1055.08 | 1055.12 |
| 28 | 69 | Ac-QSQQTY$r8NLWRLL$QN-NH2 | 2124.15 | 1063.08 | 1062.92 |
| 29 | 70 | Ac-RAibQQTF$r8NLWRLL$QN-NH2 | 2134.22 | 1068.11 | 1068.65 |
| 30 | 71 | Ac-MPRFMDYWEGLN-NH2 | 1598.70 | 800.35 | 800.45 |
| 31 | 72 | Ac-RSQQRF$r8NLWRLL$QN-NH2 | 2191.25 | 1096.63 | 1096.83 |
| 32 | 73 | Ac-QSQQRF$r8NLWRLL$QN-NH2 | 2163.21 | 1082.61 | 1082.87 |
| 33 | 74 | Ac-RAibQQRF$r8NLWRLL$QN-NH2 | 2189.27 | 1095.64 | 1096.37 |
| 34 | 75 | Ac-RSQQRF$r8NFWRLL$QN-NH2 | 2225.23 | 1113.62 | 1114.37 |
| 35 | 76 | Ac-RSQQRF$r8NYWRLL$QN-NH2 | 2241.23 | 1121.62 | 1122.37 |
| 36 | 77 | Ac-RSQQTF$r8NLWQLL$QN-NH2 | 2108.15 | 1055.08 | 1055.29 |
| 37 | 78 | Ac-QSQQTF$r8NLWQAmlL$QN-NH2 | 2094.13 | 1048.07 | 1048.32 |
| 38 | 79 | Ac-QSQQTF$r8NAmlWRLL$QN-NH2 | 2122.17 | 1062.09 | 1062.35 |
| 39 | 80 | Ac-NlePRF$r8DYWEGL$QN-NH2 | 1869.98 | 935.99 | 936.20 |
| 40 | 81 | Ac-NlePRF$r8NYWRLL$QN-NH2 | 1952.12 | 977.06 | 977.35 |
| 41 | 82 | Ac-RF$r8NLWRLL$Q-NH2 | 1577.96 | 789.98 | 790.18 |
| 42 | 83 | Ac-QSQQTF$r8N2ffWRLL$QN-NH2 | 2160.13 | 1081.07 | 1081.40 |
| 43 | 84 | Ac-QSQQTF$r8N3ffWRLL$QN-NH2 | 2160.13 | 1081.07 | 1081.34 |
| 44 | 85 | Ac-QSQQTF#r8NLWRLL#QN-NH2 | 2080.12 | 1041.06 | 1041.34 |
| 45 | 86 | Ac-RSQQTA$r8NLWRLL$QN-NH2 | 2060.16 | 1031.08 | 1031.38 |
| 46 | 87 | Ac-QSQQTF%r8NLWRLL%QN-NH2 | 2110.17 | 1056.09 | 1056.55 |
| 47 | 88 | HepQSQ$TFSNLWRLLPQN-NH2 | 2051.10 | 1026.55 | 1026.82 |
| 48 | 89 | HepQSQ$TF$r8NLWRLL$QN-NH2 | 2159.23 | 1080.62 | 1080.89 |
| 49 | 90 | Ac-QSQQTF$r8NL6clWRLL$QN-NH2 | 2142.11 | 1072.06 | 1072.35 |
| 50 | 91 | Ac-QSQQTF$r8NLMe6clwRLL$QN-NH2 | 2156.13 | 1079.07 | 1079.27 |
| 51 | 92 | Ac-LTFEHYWAQLTS-NH2 | 1535.74 | 768.87 | 768.91 |
| 52 | 93 | Ac-LTF$HYW$QLTS-NH2 | 1585.83 | 793.92 | 794.17 |
| 53 | 94 | Ac-LTFE$YWA$LTS-NH2 | 1520.79 | 761.40 | 761.67 |
| 54 | 95 | Ac-LTF$zr8HYWAQL$zS-NH2 | 1597.87 | 799.94 | 800.06 |
| 55 | 96 | Ac-LTF$r8HYWRQL$S-NH2 | 1682.93 | 842.47 | 842.72 |
| 56 | 97 | Ac-QS$QTFStNLWRLL$s8QN-NH2 | 2145.21 | 1073.61 | 1073.90 |
| 57 | 98 | Ac-QSQQTASNLWRLLPQN-NH2 | 1923.99 | 963.00 | 963.26 |
| 58 | 99 | Ac-QSQQTA$/r8NLWRLL$/QN-NH2 | 2060.15 | 1031.08 | 1031.24 |
| 59 | 100 | Ac-ASQQTF$/r8NLWRLL$/QN-NH2 | 2079.16 | 1040.58 | 1040.89 |
| 60 | 101 | Ac-$SQQ$FSNLWRLLAibQN-NH2 | 2009.09 | 1005.55 | 1005.86 |
| 61 | 102 | Ac-QS$QTF$NLWRLLAibQN-NH2 | 2023.10 | 1012.55 | 1012.79 |
| 62 | 103 | Ac-QSQQ$FSN$WRLLAibQN-NH2 | 2024.06 | 1013.03 | 1013.31 |
| 63 | 104 | Ac-QSQQTF$NLW$LLAibQN-NH2 | 1995.06 | 998.53 | 998.87 |
| 64 | 105 | Ac-QSQQTFS$LWR$LAibQN-NH2 | 2011.06 | 1006.53 | 1006.83 |
| 65 | 106 | Ac-QSQQTFSNLW$LLA$N-NH2 | 1940.02 | 971.01 | 971.29 |
| 66 | 107 | Ac-$/SQQ$/FSNLWRLLAibQN-NH2 | 2037.12 | 1019.56 | 1019.78 |
| 67 | 108 | Ac-QS$/QTF$/NLWRLLAibQN-NH2 | 2051.13 | 1026.57 | 1026.90 |
| 68 | 109 | Ac-QSQQ$/FSN$/WRLLAibQN-NH2 | 2052.09 | 1027.05 | 1027.36 |
| 69 | 110 | Ac-QSQQTF$/NLW$/LLAibQN-NH2 | 2023.09 | 1012.55 | 1013.82 |
| 70 | 111 | Ac-QSQ$TFS$LWRLLAibQN-NH2 | 1996.09 | 999.05 | 999.39 |
| 71 | 112 | Ac-QSQ$/TFS$/LWRLLAibQN-NH2 | 2024.12 | 1013.06 | 1013.37 |
| 72 | 113 | Ac-QS$/QTFSt//NLWRLL$/s8QN-NH2 | 2201.27 | 1101.64 | 1102.00 |
| 73 | 114 | Ac-$r8SQQTFS$LWRLLAibQN-NH2 | 2038.14 | 1020.07 | 1020.23 |
| 74 | 115 | Ac-QSQ$r8TFSNLW$LLAibQN-NH2 | 1996.08 | 999.04 | 999.32 |
| 75 | 116 | Ac-QSQQTFS$r8LWRLLA$N-NH2 | 2024.12 | 1013.06 | 1013.37 |
| 76 | 117 | Ac-QS$r5QTFStNLW$LLAibQN-NH2 | 2032.12 | 1017.06 | 1017.39 |
| 77 | 118 | Ac-$/r8SQQTFS$/LWRLLAibQN-NH2 | 2066.17 | 1034.09 | 1034.80 |
| 78 | 119 | Ac-QSQ$/r8TFSNLW$/LLAibQN-NH2 | 2024.11 | 1013.06 | 1014.34 |
| 79 | 120 | Ac-QSQQTFS$/r8LWRLLA$/N-NH2 | 2052.15 | 1027.08 | 1027.16 |
| 80 | 121 | Ac-QS$/r5QTFSt//NLW$/LLAibQN-NH2 | 2088.18 | 1045.09 | 1047.10 |
| 81 | 122 | Ac-QSQQTFSNLWRLLAibQN-NH2 | 1988.02 | 995.01 | 995.31 |
| 82 | 123 | Hep/QSQ$/TF$/r8NLWRLL$/QN-NH2 | 2215.29 | 1108.65 | 1108.93 |
| 83 | 124 | Ac-ASQQTF$r8NLRWLL$QN-NH2 | 2051.13 | 1026.57 | 1026.90 |
| 84 | 125 | Ac-QSQQTF$/r8NLWRLL$/Q-NH2 | 2022.14 | 1012.07 | 1012.66 |
| 85 | 126 | Ac-QSQQTF$r8NLWRLL$Q-NH2 | 1994.11 | 998.06 | 998.42 |
| 86 | 127 | Ac-AAARAA$r8AAARAA$AA-NH2 | 1515.90 | 758.95 | 759.21 |
| 87 | 128 | Ac-LTFEHYWAQLTSA-NH2 | 1606.78 | 804.39 | 804.59 |
| 88 | 129 | Ac-LTF$r8HYWAQL$SA-NH2 | 1668.90 | 835.45 | 835.67 |
| 89 | 130 | Ac-ASQQTFSNLWRLLPQN-NH2 | 1943.00 | 972.50 | 973.27 |
| 90 | 131 | Ac-QS$QTFStNLW$r5LLAibQN-NH2 | 2032.12 | 1017.06 | 1017.30 |
| 91 | 132 | Ac-QSQQTFAibNLWRLLAibQN-NH2 | 1986.04 | 994.02 | 994.19 |
| 92 | 133 | Ac-QSQQTFNleNLWRLLNleQN-NH2 | 2042.11 | 1022.06 | 1022.23 |
| 93 | 134 | Ac-QSQQTF$/r8NLWRLLAibQN-NH2 | 2082.14 | 1042.07 | 1042.23 |
| 94 | 135 | Ac-QSQQTF$/r8NLWRLLNleQN-NH2 | 2110.17 | 1056.09 | 1056.29 |
| 95 | 136 | Ac-QSQQTFAibNLWRLL$/QN-NH2 | 2040.09 | 1021.05 | 1021.25 |
| 96 | 137 | Ac-QSQQTFNleNLWRLL$/QN-NH2 | 2068.12 | 1035.06 | 1035.31 |
| 97 | 138 | Ac-QSQQTF%r8NL6clWRNleL%QN-NH2 | 2144.13 | 1073.07 | 1073.32 |
| 98 | 139 | Ac-QSQQTF%r8NLMe6clWRLL%QN-NH2 | 2158.15 | 1080.08 | 1080.31 |
| 101 | 140 | Ac-FNle$YWE$L-NH2 | 1160.63 | — | 1161.70 |
| 102 | 141 | Ac-F$r8AYWELL$A-NH2 | 1344.75 | — | 1345.90 |
| 103 | 142 | Ac-F$r8AYWQLL$A-NH2 | 1343.76 | — | 1344.83 |
| 104 | 143 | Ac-NlePRF$r8NYWELL$QN-NH2 | 1925.06 | 963.53 | 963.69 |
| 105 | 144 | Ac-NlePRF$r8DYWRLL$QN-NH2 | 1953.10 | 977.55 | 977.68 |
| 106 | 145 | Ac-NlePRF$r8NYWRLL$Q-NH2 | 1838.07 | 920.04 | 920.18 |
| 107 | 146 | Ac-NlePRF$r8NYWRLL$-NH2 | 1710.01 | 856.01 | 856.13 |
| 108 | 147 | Ac-QSQQTF$r8DLWRLL$QN-NH2 | 2109.14 | 1055.57 | 1055.64 |
| 109 | 148 | Ac-QSQQTF$r8NLWRLL$EN-NH2 | 2109.14 | 1055.57 | 1055.70 |
| 110 | 149 | Ac-QSQQTF$r8NLWRLL$QD-NH2 | 2109.14 | 1055.57 | 1055.64 |
| 111 | 150 | Ac-QSQQTF$r8NLWRLL$S-NH2 | 1953.08 | 977.54 | 977.60 |
| 112 | 151 | Ac-ESQQTF$r8NLWRLL$QN-NH2 | 2109.14 | 1055.57 | 1055.70 |
| 113 | 152 | Ac-LTF$r8NLWRNleL$Q-NH2 | 1635.99 | 819.00 | 819.10 |
| 114 | 153 | Ac-LRF$r8NLWRNleL$Q-NH2 | 1691.04 | 846.52 | 846.68 |
| 115 | 154 | Ac-QSQQTF$r8NWWRNleL$QN-NH2 | 2181.15 | 1091.58 | 1091.64 |
| 116 | 155 | Ac-QSQQTF$r8NLWRNleL$Q-NH2 | 1994.11 | 998.06 | 998.07 |
| 117 | 156 | Ac-QTF$r8NLWRNleL$QN-NH2 | 1765.00 | 883.50 | 883.59 |
| 118 | 157 | Ac-NlePRF$r8NWWRLL$QN-NH2 | 1975.13 | 988.57 | 988.75 |
| 119 | 158 | Ac-NlePRF$r8NWWRLL$A-NH2 | 1804.07 | 903.04 | 903.08 |
| 120 | 159 | Ac-TSFAEYWNLLNH2 | 1467.70 | 734.85 | 734.90 |
| 121 | 160 | Ac-QTF$r8HWWSQL$S-NH2 | 1651.85 | 826.93 | 827.12 |
| 122 | 161 | Ac-FM$YWE$L-NH2 | 1178.58 | — | 1179.64 |
| 123 | 162 | Ac-QTFEHWWSQLLS-NH2 | 1601.76 | 801.88 | 801.94 |
| 124 | 163 | Ac-QSQQTF$r8NLAmwRLNle$QN-NH2 | 2122.17 | 1062.09 | 1062.24 |
| 125 | 164 | Ac-FMAibY6clWEAc3cL-NH2 | 1130.47 | — | 1131.53 |
| 126 | 165 | Ac-FNle$Y6clWE$L-NH2 | 1194.59 | — | 1195.64 |
| 127 | 166 | Ac-F$zr8AY6clWEAc3cL$z-NH2 | 1277.63 | 639.82 | 1278.71 |
| 128 | 167 | Ac-F$r8AY6clWEAc3cL$A-NH2 | 1348.66 | — | 1350.72 |
| 129 | 168 | Ac-NlePRF$r8NY6clWRLL$QN-NH2 | 1986.08 | 994.04 | 994.64 |
| 130 | 169 | Ac-AF$r8AAWALA$A-NH2 | 1223.71 | — | 1224.71 |
| 131 | 170 | Ac-TF$r8AAWRLA$Q-NH2 | 1395.80 | 698.90 | 399.04 |
| 132 | 171 | Pr-TF$r8AAWRLA$Q-NH2 | 1409.82 | 705.91 | 706.04 |
| 133 | 172 | Ac-QSQQTF%r8NLWRNleL%QN-NH2 | 2110.17 | 1056.09 | 1056.22 |
| 134 | 173 | Ac-LTF%r8HYWAQL%SA-NH2 | 1670.92 | 836.46 | 836.58 |
| 135 | 174 | Ac-NlePRF%r8NYWRLL%QN-NH2 | 1954.13 | 978.07 | 978.19 |
| 136 | 175 | Ac-NlePRF%r8NY6clWRLL%QN-NH2 | 1988.09 | 995.05 | 995.68 |
| 137 | 176 | Ac-LTF%r8HY6clWAQL%S-NH2 | 1633.84 | 817.92 | 817.93 |
| 138 | 177 | Ac-QS%QTF%StNLWRLL%s8QN-NH2 | 2149.24 | 1075.62 | 1075.65 |
| 139 | 178 | Ac-LTF%r8HY6clWRQL%S-NH2 | 1718.91 | 860.46 | 860.54 |
| 140 | 179 | Ac-QSQQTF%r8NL6clWRLL%QN-NH2 | 2144.13 | 1073.07 | 1073.64 |
| 141 | 180 | Ac-%r8SQQTFS%LWRLLAibQN-NH2 | 2040.15 | 1021.08 | 1021.13 |
| 142 | 181 | Ac-LTF%r8HYWAQL%S-NH2 | 1599.88 | 800.94 | 801.09 |
| 143 | 182 | Ac-TSF%r8QYWNLL%P-NH2 | 1602.88 | 802.44 | 802.58 |
| 147 | 183 | Ac-LTFEHYWAQLTS-NH2 | 1535.74 | 768.87 | 769.5 |
| 152 | 184 | Ac-F$er8AY6clWEAc3cL$e-NH2 | 1277.63 | 639.82 | 1278.71 |
| 153 | 185 | Ac-AF$r8AAWALA$A-NH2 | 1277.63 | 639.82 | 1277.84 |
| 154 | 186 | Ac-TF$r8AAWRLA$Q-NH2 | 1395.80 | 698.90 | 699.04 |
| 155 | 187 | Pr-TF$r8AAWRLA$Q-NH2 | 1409.82 | 705.91 | 706.04 |
| 156 | 188 | Ac-LTF$er8HYWAQL$eS-NH2 | 1597.87 | 799.94 | 800.44 |
| 159 | 189 | Ac-CCPGCCBaQSQQTF$r8NLWRLL$QN-NH2 | 2745.30 | 1373.65 | 1372.99 |
| 160 | 190 | Ac-CCPGCCBaQSQQTA$r8NLWRLL$QN-NH2 | 2669.27 | 1335.64 | 1336.09 |
| 161 | 191 | Ac-CCPGCCBaNlePRF$r8NYWRLL$QN-NH2 | 2589.26 | 1295.63 | 1296.2 |
| 162 | 192 | Ac-LTF$/r8HYWAQL$/S-NH2 | 1625.90 | 813.95 | 814.18 |
| 163 | 193 | Ac-F%r8HY6clWRAc3cL%-NH2 | 1372.72 | 687.36 | 687.59 |
| 164 | 194 | Ac-QTF%r8HWWSQL%S-NH2 | 1653.87 | 827.94 | 827.94 |
| 165 | 195 | Ac-LTA$r8HYWRQL$S-NH2 | 1606.90 | 804.45 | 804.66 |
| 166 | 196 | Ac-Q$r8QQTFSN$WRLLAibQN-NH2 | 2080.12 | 1041.06 | 1041.61 |
| 167 | 197 | Ac-QSQQ$r8FSNLWR$LAibQN-NH2 | 2066.11 | 1034.06 | 1034.58 |
| 168 | 198 | Ac-F$r8AYWEAc3cL$A-NH2 | 1314.70 | 658.35 | 1315.88 |
| 169 | 199 | Ac-F$r8AYWEAc3cL$S-NH2 | 1330.70 | 666.35 | 1331.87 |
| 170 | 200 | Ac-F$r8AYWEAc3cL$Q-NH2 | 1371.72 | 686.86 | 1372.72 |
| 171 | 201 | Ac-F$r8AYWEAibL$S-NH2 | 1332.71 | 667.36 | 1334.83 |
| 172 | 202 | Ac-F$r8AYWEAL$S-NH2 | 1318.70 | 660.35 | 1319.73 |
| 173 | 203 | Ac-F$r8AYWEQL$S-NH2 | 1375.72 | 688.86 | 1377.53 |
| 174 | 204 | Ac-F$r8HYWEQL$S-NH2 | 1441.74 | 721.87 | 1443.48 |
| 175 | 205 | Ac-F$r8HYWAQL$S-NH2 | 1383.73 | 692.87 | 1385.38 |
| 176 | 206 | Ac-F$r8HYWAAc3cL$S-NH2 | 1338.71 | 670.36 | 1340.82 |
| 177 | 207 | Ac-F$r8HYWRAc3cL$S-NH2 | 1423.78 | 712.89 | 713.04 |
| 178 | 208 | Ac-F$r8AYWEAc3cL#A-NH2 | 1300.69 | 651.35 | 1302.78 |
| 179 | 209 | Ac-NlePTF%r8NYWRLL%QN-NH2 | 1899.08 | 950.54 | 950.56 |
| 180 | 210 | Ac-TF$r8AAWRAL$Q-NH2 | 1395.80 | 698.90 | 699.13 |
| 181 | 211 | Ac-TSF%r8HYWAQL%S-NH2 | 1573.83 | 787.92 | 787.98 |
| 184 | 212 | Ac-F%r8AY6clWEAc3cL%A-NH2 | 1350.68 | 676.34 | 676.91 |
| 185 | 213 | Ac-LTF$r8HYWAQI$S-NH2 | 1597.87 | 799.94 | 800.07 |
| 186 | 214 | Ac-LTF$r8HYWAQNle$S-NH2 | 1597.87 | 799.94 | 800.07 |
| 187 | 215 | Ac-LTF$r8HYWAQL$A-NH2 | 1581.87 | 791.94 | 792.45 |
| 188 | 216 | Ac-LTF$r8HYWAQL$Abu-NH2 | 1595.89 | 798.95 | 799.03 |
| 189 | 217 | Ac-LTF$r8HYWAbuQL$S-NH2 | 1611.88 | 806.94 | 807.47 |
| 190 | 218 | Ac-LTF$er8AYWAQL$eS-NH2 | 1531.84 | 766.92 | 766.96 |
| 191 | 219 | Ac-LAF$r8HYWAQL$S-NH2 | 1567.86 | 784.93 | 785.49 |
| 192 | 220 | Ac-LAF$r8AYWAQL$S-NH2 | 1501.83 | 751.92 | 752.01 |
| 193 | 221 | Ac-LTF$er8AYWAQL$eA-NH2 | 1515.85 | 758.93 | 758.97 |
| 194 | 222 | Ac-LAF$r8AYWAQL$A-NH2 | 1485.84 | 743.92 | 744.05 |
| 195 | 223 | Ac-LTF$r8NLWANleL$Q-NH2 | 1550.92 | 776.46 | 776.61 |
| 196 | 224 | Ac-LTF$r8NLWANleL$A-NH2 | 1493.90 | 747.95 | 1495.6 |
| 197 | 225 | Ac-LTF$r8ALWANleL$Q-NH2 | 1507.92 | 754.96 | 755 |
| 198 | 226 | Ac-LAF$r8NLWANleL$Q-NH2 | 1520.91 | 761.46 | 761.96 |
| 199 | 227 | Ac-LAF$r8ALWANleL$A-NH2 | 1420.89 | 711.45 | 1421.74 |
| 200 | 228 | Ac-A$r8AYWEAc3cL$A-NH2 | 1238.67 | 620.34 | 1239.65 |
| 201 | 229 | Ac-F$r8AYWEAc3cL$AA-NH2 | 1385.74 | 693.87 | 1386.64 |
| 202 | 230 | Ac-F$r8AYWEAc3cL$Abu-NH2 | 1328.72 | 665.36 | 1330.17 |
| 203 | 231 | Ac-F$r8AYWEAc3cL$Nle-NH2 | 1356.75 | 679.38 | 1358.22 |
| 204 | 232 | Ac-F$r5AYWEAc3cL$s8A-NH2 | 1314.70 | 658.35 | 1315.51 |
| 205 | 233 | Ac-F$AYWEAc3cL$r8A-NH2 | 1314.70 | 658.35 | 1315.66 |
| 206 | 234 | Ac-F$r8AYWEAc3cI$A-NH2 | 1314.70 | 658.35 | 1316.18 |
| 207 | 235 | Ac-F$r8AYWEAc3cNle$A-NH2 | 1314.70 | 658.35 | 1315.66 |
| 208 | 236 | Ac-F$r8AYWEAmlL$A-NH2 | 1358.76 | 680.38 | 1360.21 |
| 209 | 237 | Ac-F$r8AYWENleL$A-NH2 | 1344.75 | 673.38 | 1345.71 |
| 210 | 238 | Ac-F$r8AYWQAc3cL$A-NH2 | 1313.72 | 657.86 | 1314.7 |
| 211 | 239 | Ac-F$r8AYWAAc3cL$A-NH2 | 1256.70 | 629.35 | 1257.56 |
| 212 | 240 | Ac-F$r8AYWAbuAc3cL$A-NH2 | 1270.71 | 636.36 | 1272.14 |
| 213 | 241 | Ac-F$r8AYWNleAc3cL$A-NH2 | 1298.74 | 650.37 | 1299.67 |
| 214 | 242 | Ac-F$r8AbuYWEAc3cL$A-NH2 | 1328.72 | 665.36 | 1329.65 |
| 215 | 243 | Ac-F$r8NleYWEAc3cL$A-NH2 | 1356.75 | 679.38 | 1358.66 |
| 216 | 244 | 5-FAM-BaLTFEHYWAQLTS-NH2 | 1922.82 | 962.41 | 962.87 |
| 217 | 245 | 5-FAM-BaLTF%r8HYWAQL%S-NH2 | 1986.96 | 994.48 | 994.97 |
| 218 | 246 | Ac-LTF$r8HYWAQhL$S-NH2 | 1611.88 | 806.94 | 807 |
| 219 | 247 | Ac-LTF$r8HYWAQTle$S-NH2 | 1597.87 | 799.94 | 799.97 |
| 220 | 248 | Ac-LTF$r8HYWAQAdm$S-NH2 | 1675.91 | 838.96 | 839.09 |
| 221 | 249 | Ac-LTF$r8HYWAQhCha$S-NH2 | 1651.91 | 826.96 | 826.98 |
| 222 | 250 | Ac-LTF$r8HYWAQCha$S-NH2 | 1637.90 | 819.95 | 820.02 |
| 223 | 251 | Ac-LTF$r8HYWAc6cQL$S-NH2 | 1651.91 | 826.96 | 826.98 |
| 224 | 252 | Ac-LTF$r8HYWAc5cQL$S-NH2 | 1637.90 | 819.95 | 820.02 |
| 225 | 253 | Ac-LThF$r8HYWAQL$S-NH2 | 1611.88 | 806.94 | 807 |
| 226 | 254 | Ac-LTIgl$r8HYWAQL$S-NH2 | 1625.90 | 813.95 | 812.99 |
| 227 | 255 | Ac-LTF$r8HYWAQChg$S-NH2 | 1623.88 | 812.94 | 812.99 |
| 228 | 256 | Ac-LTF$r8HYWAQF$S-NH2 | 1631.85 | 816.93 | 816.99 |
| 229 | 257 | Ac-LTF$r8HYWAQIgl$S-NH2 | 1659.88 | 830.94 | 829.94 |
| 230 | 258 | Ac-LTF$r8HYWAQCba$S-NH2 | 1609.87 | 805.94 | 805.96 |
| 231 | 259 | Ac-LTF$r8HYWAQCpg$S-NH2 | 1609.87 | 805.94 | 805.96 |
| 232 | 260 | Ac-LTF$r8HhYWAQL$S-NH2 | 1611.88 | 806.94 | 807 |
| 233 | 261 | Ac-F$r8AYWEAc3chL$A-NH2 | 1328.72 | 665.36 | 665.43 |
| 234 | 262 | Ac-F$r8AYWEAc3cTle$A-NH2 | 1314.70 | 658.35 | 1315.62 |
| 235 | 263 | Ac-F$r8AYWEAc3cAdm$A-NH2 | 1392.75 | 697.38 | 697.47 |
| 236 | 264 | Ac-F$r8AYWEAc3chCha$A-NH2 | 1368.75 | 685.38 | 685.34 |
| 237 | 265 | Ac-F$r8AYWEAc3cCha$A-NH2 | 1354.73 | 678.37 | 678.38 |
| 238 | 266 | Ac-F$r8AYWEAc6cL$A-NH2 | 1356.75 | 679.38 | 679.42 |
| 239 | 267 | Ac-F$r8AYWEAc5cL$A-NH2 | 1342.73 | 672.37 | 672.46 |
| 240 | 268 | Ac-hF$r8AYWEAc3cL$A-NH2 | 1328.72 | 665.36 | 665.43 |
| 241 | 269 | Ac-Igl$r8AYWEAc3cL$A-NH2 | 1342.73 | 672.37 | 671.5 |
| 243 | 270 | Ac-F$r8AYWEAc3cF$A-NH2 | 1348.69 | 675.35 | 675.35 |
| 244 | 271 | Ac-F$r8AYWEAc3cIgl$A-NH2 | 1376.72 | 689.36 | 688.37 |
| 245 | 272 | Ac-F$r8AYWEAc3cCba$A-NH2 | 1326.70 | 664.35 | 664.47 |
| 246 | 273 | Ac-F$r8AYWEAc3cCpg$A-NH2 | 1326.70 | 664.35 | 664.39 |
| 247 | 274 | Ac-F$r8AhYWEAc3cL$A-NH2 | 1328.72 | 665.36 | 665.43 |
| 248 | 275 | Ac-F$r8AYWEAc3cL$Q-NH2 | 1371.72 | 686.86 | 1372.87 |
| 249 | 276 | Ac-F$r8AYWEAibL$A-NH2 | 1316.72 | 659.36 | 1318.18 |
| 250 | 277 | Ac-F$r8AYWEAL$A-NH2 | 1302.70 | 652.35 | 1303.75 |
| 251 | 278 | Ac-LAF$r8AYWAAL$A-NH2 | 1428.82 | 715.41 | 715.49 |
| 252 | 279 | Ac-LTF$r8HYWAAc3cL$S-NH2 | 1552.84 | 777.42 | 777.5 |
| 253 | 280 | Ac-NleTF$r8HYWAQL$S-NH2 | 1597.87 | 799.94 | 800.04 |
| 254 | 281 | Ac-VTF$r8HYWAQL$S-NH2 | 1583.85 | 792.93 | 793.04 |
| 255 | 282 | Ac-FTF$r8HYWAQL$S-NH2 | 1631.85 | 816.93 | 817.02 |
| 256 | 283 | Ac-WTF$r8HYWAQL$S-NH2 | 1670.86 | 836.43 | 836.85 |
| 257 | 284 | Ac-RTF$r8HYWAQL$S-NH2 | 1640.88 | 821.44 | 821.9 |
| 258 | 285 | Ac-KTF$r8HYWAQL$S-NH2 | 1612.88 | 807.44 | 807.91 |
| 259 | 286 | Ac-LNleF$r8HYWAQL$S-NH2 | 1609.90 | 805.95 | 806.43 |
| 260 | 287 | Ac-LVF$r8HYWAQL$S-NH2 | 1595.89 | 798.95 | 798.93 |
| 261 | 288 | Ac-LFF$r8HYWAQL$S-NH2 | 1643.89 | 822.95 | 823.38 |
| 262 | 289 | Ac-LWF$r8HYWAQL$S-NH2 | 1682.90 | 842.45 | 842.55 |
| 263 | 290 | Ac-LRF$r8HYWAQL$S-NH2 | 1652.92 | 827.46 | 827.52 |
| 264 | 291 | Ac-LKF$r8HYWAQL$S-NH2 | 1624.91 | 813.46 | 813.51 |
| 265 | 292 | Ac-LTF$r8NleYWAQL$S-NH2 | 1573.89 | 787.95 | 788.05 |
| 266 | 293 | Ac-LTF$r8VYWAQL$S-NH2 | 1559.88 | 780.94 | 780.98 |
| 267 | 294 | Ac-LTF$r8FYWAQL$S-NH2 | 1607.88 | 804.94 | 805.32 |
| 268 | 295 | Ac-LTF$r8WYWAQL$S-NH2 | 1646.89 | 824.45 | 824.86 |
| 269 | 296 | Ac-LTF$r8RYWAQL$S-NH2 | 1616.91 | 809.46 | 809.51 |
| 270 | 297 | Ac-LTF$r8KYWAQL$S-NH2 | 1588.90 | 795.45 | 795.48 |
| 271 | 298 | Ac-LTF$r8HNleWAQL$S-NH2 | 1547.89 | 774.95 | 774.98 |
| 272 | 299 | Ac-LTF$r8HVWAQL$S-NH2 | 1533.87 | 767.94 | 767.95 |
| 273 | 300 | Ac-LTF$r8HFWAQL$S-NH2 | 1581.87 | 791.94 | 792.3 |
| 274 | 301 | Ac-LTF$r8HWWAQL$S-NH2 | 1620.88 | 811.44 | 811.54 |
| 275 | 302 | Ac-LTF$r8HRWAQL$S-NH2 | 1590.90 | 796.45 | 796.52 |
| 276 | 303 | Ac-LTF$r8HKWAQL$S-NH2 | 1562.90 | 782.45 | 782.53 |
| 277 | 304 | Ac-LTF$r8HYWNleQL$S-NH2 | 1639.91 | 820.96 | 820.98 |
| 278 | 305 | Ac-LTF$r8HYWVQL$S-NH2 | 1625.90 | 813.95 | 814.03 |
| 279 | 306 | Ac-LTF$r8HYWFQL$S-NH2 | 1673.90 | 837.95 | 838.03 |
| 280 | 307 | Ac-LTF$r8HYWWQL$S-NH2 | 1712.91 | 857.46 | 857.5 |
| 281 | 308 | Ac-LTF$r8HYWKQL$S-NH2 | 1654.92 | 828.46 | 828.49 |
| 282 | 309 | Ac-LTF$r8HYWANleL$S-NH2 | 1582.89 | 792.45 | 792.52 |
| 283 | 310 | Ac-LTF$r8HYWAVL$S-NH2 | 1568.88 | 785.44 | 785.49 |
| 284 | 311 | Ac-LTF$r8HYWAFL$S-NH2 | 1616.88 | 809.44 | 809.47 |
| 285 | 312 | Ac-LTF$r8HYWAWL$S-NH2 | 1655.89 | 828.95 | 829 |
| 286 | 313 | Ac-LTF$r8HYWARL$S-NH2 | 1625.91 | 813.96 | 813.98 |
| 287 | 314 | Ac-LTF$r8HYWAQL$Nle-NH2 | 1623.92 | 812.96 | 813.39 |
| 288 | 315 | Ac-LTF$r8HYWAQL$V-NH2 | 1609.90 | 805.95 | 805.99 |
| 289 | 316 | Ac-LTF$r8HYWAQL$F-NH2 | 1657.90 | 829.95 | 830.26 |
| 290 | 317 | Ac-LTF$r8HYWAQL$W-NH2 | 1696.91 | 849.46 | 849.5 |
| 291 | 318 | Ac-LTF$r8HYWAQL$R-NH2 | 1666.94 | 834.47 | 834.56 |
| 292 | 319 | Ac-LTF$r8HYWAQL$K-NH2 | 1638.93 | 820.47 | 820.49 |
| 293 | 320 | Ac-Q$r8QQTFSN$WRLLAibQN-NH2 | 2080.12 | 1041.06 | 1041.54 |
| 294 | 321 | Ac-QSQQ$r8FSNLWR$LAibQN-NH2 | 2066.11 | 1034.06 | 1034.58 |
| 295 | 322 | Ac-LT2Pal$r8HYWAQL$S-NH2 | 1598.86 | 800.43 | 800.49 |
| 296 | 323 | Ac-LT3Pal$r8HYWAQL$S-NH2 | 1598.86 | 800.43 | 800.49 |
| 297 | 324 | Ac-LT4Pal$r8HYWAQL$S-NH2 | 1598.86 | 800.43 | 800.49 |
| 298 | 325 | Ac-LTF2CF3$r8HYWAQL$S-NH2 | 1665.85 | 833.93 | 834.01 |
| 299 | 326 | Ac-LTF2CN$r8HYWAQL$S-NH2 | 1622.86 | 812.43 | 812.47 |
| 300 | 327 | Ac-LTF2Me$r8HYWAQL$S-NH2 | 1611.88 | 806.94 | 807 |
| 301 | 328 | Ac-LTF3Cl$r8HYWAQL$S-NH2 | 1631.83 | 816.92 | 816.99 |
| 302 | 329 | Ac-LTF4CF3$r8HYWAQL$S-NH2 | 1665.85 | 833.93 | 833.94 |
| 303 | 330 | Ac-LTF4tBu$r8HYWAQL$S-NH2 | 1653.93 | 827.97 | 828.02 |
| 304 | 331 | Ac-LTF5F$r8HYWAQL$S-NH2 | 1687.82 | 844.91 | 844.96 |
| 305 | 332 | Ac-LTF$r8HY3BthAAQL$S-NH2 | 1614.83 | 808.42 | 808.48 |
| 306 | 333 | Ac-LTF2Br$r8HYWAQL$S-NH2 | 1675.78 | 838.89 | 838.97 |
| 307 | 334 | Ac-LTF4Br$r8HYWAQL$S-NH2 | 1675.78 | 838.89 | 839.86 |
| 308 | 335 | Ac-LTF2Cl$r8HYWAQL$S-NH2 | 1631.83 | 816.92 | 816.99 |
| 309 | 336 | Ac-LTF4Cl$r8HYWAQL$S-NH2 | 1631.83 | 816.92 | 817.36 |
| 310 | 337 | Ac-LTF3CN$r8HYWAQL$S-NH2 | 1622.86 | 812.43 | 812.47 |
| 311 | 338 | Ac-LTF4CN$r8HYWAQL$S-NH2 | 1622.86 | 812.43 | 812.47 |
| 312 | 339 | Ac-LTF34Cl2$r8HYWAQL$S-NH2 | 1665.79 | 833.90 | 833.94 |
| 313 | 340 | Ac-LTF34F2$r8HYWAQL$S-NH2 | 1633.85 | 817.93 | 817.95 |
| 314 | 341 | Ac-LTF35F2$r8HYWAQL$S-NH2 | 1633.85 | 817.93 | 817.95 |
| 315 | 342 | Ac-LTDip$r8HYWAQL$S-NH2 | 1673.90 | 837.95 | 838.01 |
| 316 | 343 | Ac-LTF2F$r8HYWAQL$S-NH2 | 1615.86 | 808.93 | 809 |
| 317 | 344 | Ac-LTF3F$r8HYWAQL$S-NH2 | 1615.86 | 808.93 | 809 |
| 318 | 345 | Ac-LTF4F$r8HYWAQL$S-NH2 | 1615.86 | 808.93 | 809 |
| 319 | 346 | Ac-LTF4I$r8HYWAQL$S-NH2 | 1723.76 | 862.88 | 862.94 |
| 320 | 347 | Ac-LTF3Me$r8HYWAQL$S-NH2 | 1611.88 | 806.94 | 807.07 |
| 321 | 348 | Ac-LTF4Me$r8HYWAQL$S-NH2 | 1611.88 | 806.94 | 807 |
| 322 | 349 | Ac-LT1Nal$r8HYWAQL$S-NH2 | 1647.88 | 824.94 | 824.98 |
| 323 | 350 | Ac-LT2Nal$r8HYWAQL$S-NH2 | 1647.88 | 824.94 | 825.06 |
| 324 | 351 | Ac-LTF3CF3$r8HYWAQL$S-NH2 | 1665.85 | 833.93 | 834.01 |
| 325 | 352 | Ac-LTF4NO2$r8HYWAQL$S-NH2 | 1642.85 | 822.43 | 822.46 |
| 326 | 353 | Ac-LTF3NO2$r8HYWAQL$S-NH2 | 1642.85 | 822.43 | 822.46 |
| 327 | 354 | Ac-LTF$r82ThiYWAQL$S-NH2 | 1613.83 | 807.92 | 807.96 |
| 328 | 355 | Ac-LTF$r8HBipWAQL$S-NH2 | 1657.90 | 829.95 | 830.01 |
| 329 | 356 | Ac-LTF$r8HF4tBuWAQL$S-NH2 | 1637.93 | 819.97 | 820.02 |
| 330 | 357 | Ac-LTF$r8HF4CF3WAQL$S-NH2 | 1649.86 | 825.93 | 826.02 |
| 331 | 358 | Ac-LTF$r8HF4ClWAQL$S-NH2 | 1615.83 | 808.92 | 809.37 |
| 332 | 359 | Ac-LTF$r8HF4MeWAQL$S-NH2 | 1595.89 | 798.95 | 799.01 |
| 333 | 360 | Ac-LTF$r8HF4BrWAQL$S-NH2 | 1659.78 | 830.89 | 830.98 |
| 334 | 361 | Ac-LTF$r8HF4CNWAQL$S-NH2 | 1606.87 | 804.44 | 804.56 |
| 335 | 362 | Ac-LTF$r8HF4NO2WAQL$S-NH2 | 1626.86 | 814.43 | 814.55 |
| 336 | 363 | Ac-LTF$r8H1NalWAQL$S-NH2 | 1631.89 | 816.95 | 817.06 |
| 337 | 364 | Ac-LTF$r8H2NalWAQL$S-NH2 | 1631.89 | 816.95 | 816.99 |
| 338 | 365 | Ac-LTF$r8HWAQL$S-NH2 | 1434.80 | 718.40 | 718.49 |
| 339 | 366 | Ac-LTF$r8HY1NalAQL$S-NH2 | 1608.87 | 805.44 | 805.52 |
| 340 | 367 | Ac-LTF$r8HY2NalAQL$S-NH2 | 1608.87 | 805.44 | 805.52 |
| 341 | 368 | Ac-LTF$r8HYWAQI$S-NH2 | 1597.87 | 799.94 | 800.07 |
| 342 | 369 | Ac-LTF$r8HYWAQNle$S-NH2 | 1597.87 | 799.94 | 800.44 |
| 343 | 370 | Ac-LTF$er8HYWAQL$eA-NH2 | 1581.87 | 791.94 | 791.98 |
| 344 | 371 | Ac-LTF$r8HYWAQL$Abu-NH2 | 1595.89 | 798.95 | 799.03 |
| 345 | 372 | Ac-LTF$r8HYWAbuQL$S-NH2 | 1611.88 | 806.94 | 804.47 |
| 346 | 373 | Ac-LAF$r8HYWAQL$S-NH2 | 1567.86 | 784.93 | 785.49 |
| 347 | 374 | Ac-LTF$r8NLWANleL$Q-NH2 | 1550.92 | 776.46 | 777.5 |
| 348 | 375 | Ac-LTF$r8ALWANleL$Q-NH2 | 1507.92 | 754.96 | 755.52 |
| 349 | 376 | Ac-LAF$r8NLWANleL$Q-NH2 | 1520.91 | 761.46 | 762.48 |
| 350 | 377 | Ac-F$r8AYWAAc3cL$A-NH2 | 1256.70 | 629.35 | 1257.56 |
| 351 | 378 | Ac-LTF$r8AYWAAL$S-NH2 | 1474.82 | 738.41 | 738.55 |
| 352 | 379 | Ac-LVF$r8AYWAQL$S-NH2 | 1529.87 | 765.94 | 766 |
| 353 | 380 | Ac-LTF$r8AYWAbuQL$S-NH2 | 1545.86 | 773.93 | 773.92 |
| 354 | 381 | Ac-LTF$r8AYWNleQL$S-NH2 | 1573.89 | 787.95 | 788.17 |
| 355 | 382 | Ac-LTF$r8AbuYWAQL$S-NH2 | 1545.86 | 773.93 | 773.99 |
| 356 | 383 | Ac-LTF$r8AYWHQL$S-NH2 | 1597.87 | 799.94 | 799.97 |
| 357 | 384 | Ac-LTF$r8AYWKQL$S-NH2 | 1588.90 | 795.45 | 795.53 |
| 358 | 385 | Ac-LTF$r8AYWOQL$S-NH2 | 1574.89 | 788.45 | 788.5 |
| 359 | 386 | Ac-LTF$r8AYWRQL$S-NH2 | 1616.91 | 809.46 | 809.51 |
| 360 | 387 | Ac-LTF$r8AYWSQL$S-NH2 | 1547.84 | 774.92 | 774.96 |
| 361 | 388 | Ac-LTF$r8AYWRAL$S-NH2 | 1559.89 | 780.95 | 780.95 |
| 362 | 389 | Ac-LTF$r8AYWRQL$A-NH2 | 1600.91 | 801.46 | 801.52 |
| 363 | 390 | Ac-LTF$r8AYWRAL$A-NH2 | 1543.89 | 772.95 | 773.03 |
| 364 | 391 | Ac-LTF$r5HYWAQL$s8S-NH2 | 1597.87 | 799.94 | 799.97 |
| 365 | 392 | Ac-LTF$HYWAQL$r8S-NH2 | 1597.87 | 799.94 | 799.97 |
| 366 | 393 | Ac-LTF$r8HYWAAL$S-NH2 | 1540.84 | 771.42 | 771.48 |
| 367 | 394 | Ac-LTF$r8HYWAAbuL$S-NH2 | 1554.86 | 778.43 | 778.51 |
| 368 | 395 | Ac-LTF$r8HYWALL$S-NH2 | 1582.89 | 792.45 | 792.49 |
| 369 | 396 | Ac-F$r8AYWHAL$A-NH2 | 1310.72 | 656.36 | 656.4 |
| 370 | 397 | Ac-F$r8AYWAAL$A-NH2 | 1244.70 | 623.35 | 1245.61 |
| 371 | 398 | Ac-F$r8AYWSAL$A-NH2 | 1260.69 | 631.35 | 1261.6 |
| 372 | 399 | Ac-F$r8AYWRAL$A-NH2 | 1329.76 | 665.88 | 1330.72 |
| 373 | 400 | Ac-F$r8AYWKAL$A-NH2 | 1301.75 | 651.88 | 1302.67 |
| 374 | 401 | Ac-F$r8AYWOAL$A-NH2 | 1287.74 | 644.87 | 1289.13 |
| 375 | 402 | Ac-F$r8VYWEAc3cL$A-NH2 | 1342.73 | 672.37 | 1343.67 |
| 376 | 403 | Ac-F$r8FYWEAc3cL$A-NH2 | 1390.73 | 696.37 | 1392.14 |
| 377 | 404 | Ac-F$r8WYWEAc3cL$A-NH2 | 1429.74 | 715.87 | 1431.44 |
| 378 | 405 | Ac-F$r8RYWEAc3cL$A-NH2 | 1399.77 | 700.89 | 700.95 |
| 379 | 406 | Ac-F$r8KYWEAc3cL$A-NH2 | 1371.76 | 686.88 | 686.97 |
| 380 | 407 | Ac-F$r8ANleWEAc3cL$A-NH2 | 1264.72 | 633.36 | 1265.59 |
| 381 | 408 | Ac-F$r8AVWEAc3cL$A-NH2 | 1250.71 | 626.36 | 1252.2 |
| 382 | 409 | Ac-F$r8AFWEAc3cL$A-NH2 | 1298.71 | 650.36 | 1299.64 |
| 383 | 410 | Ac-F$r8AWWEAc3cL$A-NH2 | 1337.72 | 669.86 | 1338.64 |
| 384 | 411 | Ac-F$r8ARWEAc3cL$A-NH2 | 1307.74 | 654.87 | 655 |
| 385 | 412 | Ac-F$r8AKWEAc3cL$A-NH2 | 1279.73 | 640.87 | 641.01 |
| 386 | 413 | Ac-F$r8AYWVAc3cL$A-NH2 | 1284.73 | 643.37 | 643.38 |
| 387 | 414 | Ac-F$r8AYWFAc3cL$A-NH2 | 1332.73 | 667.37 | 667.43 |
| 388 | 415 | Ac-F$r8AYWWAc3cL$A-NH2 | 1371.74 | 686.87 | 686.97 |
| 389 | 416 | Ac-F$r8AYWRAc3cL$A-NH2 | 1341.76 | 671.88 | 671.94 |
| 390 | 417 | Ac-F$r8AYWKAc3cL$A-NH2 | 1313.75 | 657.88 | 657.88 |
| 391 | 418 | Ac-F$r8AYWEVL$A-NH2 | 1330.73 | 666.37 | 666.47 |
| 392 | 419 | Ac-F$r8AYWEFL$A-NH2 | 1378.73 | 690.37 | 690.44 |
| 393 | 420 | Ac-F$r8AYWEWL$A-NH2 | 1417.74 | 709.87 | 709.91 |
| 394 | 421 | Ac-F$r8AYWERL$A-NH2 | 1387.77 | 694.89 | 1388.66 |
| 395 | 422 | Ac-F$r8AYWEKL$A-NH2 | 1359.76 | 680.88 | 1361.21 |
| 396 | 423 | Ac-F$r8AYWEAc3cL$V-NH2 | 1342.73 | 672.37 | 1343.59 |
| 397 | 424 | Ac-F$r8AYWEAc3cL$F-NH2 | 1390.73 | 696.37 | 1392.58 |
| 398 | 425 | Ac-F$r8AYWEAc3cL$W-NH2 | 1429.74 | 715.87 | 1431.29 |
| 399 | 426 | Ac-F$r8AYWEAc3cL$R-NH2 | 1399.77 | 700.89 | 700.95 |
| 400 | 427 | Ac-F$r8AYWEAc3cL$K-NH2 | 1371.76 | 686.88 | 686.97 |
| 401 | 428 | Ac-F$r8AYWEAc3cL$AV-NH2 | 1413.77 | 707.89 | 707.91 |
| 402 | 429 | Ac-F$r8AYWEAc3cL$AF-NH2 | 1461.77 | 731.89 | 731.96 |
| 403 | 430 | Ac-F$r8AYWEAc3cL$AW-NH2 | 1500.78 | 751.39 | 751.5 |
| 404 | 431 | Ac-F$r8AYWEAc3cL$AR-NH2 | 1470.80 | 736.40 | 736.47 |
| 405 | 432 | Ac-F$r8AYWEAc3cL$AK-NH2 | 1442.80 | 722.40 | 722.41 |
| 406 | 433 | Ac-F$r8AYWEAc3cL$AH-NH2 | 1451.76 | 726.88 | 726.93 |
| 407 | 434 | Ac-LTF2NO2$r8HYWAQL$S-NH2 | 1642.85 | 822.43 | 822.54 |
| 408 | 435 | Ac-LTA$r8HYAAQL$S-NH2 | 1406.79 | 704.40 | 704.5 |
| 409 | 436 | Ac-LTF$r8HYAAQL$S-NH2 | 1482.82 | 742.41 | 742.47 |
| 410 | 437 | Ac-QSQQTF$r8NLWALL$AN-NH2 | 1966.07 | 984.04 | 984.38 |
| 411 | 438 | Ac-QAibQQTF$r8NLWALL$AN-NH2 | 1964.09 | 983.05 | 983.42 |
| 412 | 439 | Ac-QAibQQTF$r8ALWALL$AN-NH2 | 1921.08 | 961.54 | 961.59 |
| 413 | 440 | Ac-AAAATF$r8AAWAAL$AA-NH2 | 1608.90 | 805.45 | 805.52 |
| 414 | 441 | Ac-F$r8AAWRAL$Q-NH2 | 1294.76 | 648.38 | 648.48 |
| 415 | 442 | Ac-TF$r8AAWAAL$Q-NH2 | 1310.74 | 656.37 | 1311.62 |
| 416 | 443 | Ac-TF$r8AAWRAL$A-NH2 | 1338.78 | 670.39 | 670.46 |
| 417 | 444 | Ac-VF$r8AAWRAL$Q-NH2 | 1393.82 | 697.91 | 697.99 |
| 418 | 445 | Ac-AF$r8AAWAAL$A-NH2 | 1223.71 | 612.86 | 1224.67 |
| 420 | 446 | Ac-TF$r8AAWKAL$Q-NH2 | 1367.80 | 684.90 | 684.97 |
| 421 | 447 | Ac-TF$r8AAWOAL$Q-NH2 | 1353.78 | 677.89 | 678.01 |
| 422 | 448 | Ac-TF$r8AAWSAL$Q-NH2 | 1326.73 | 664.37 | 664.47 |
| 423 | 449 | Ac-LTF$r8AAWRAL$Q-NH2 | 1508.89 | 755.45 | 755.49 |
| 424 | 450 | Ac-F$r8AYWAQL$A-NH2 | 1301.72 | 651.86 | 651.96 |
| 425 | 451 | Ac-F$r8AWWAAL$A-NH2 | 1267.71 | 634.86 | 634.87 |
| 426 | 452 | Ac-F$r8AWWAQL$A-NH2 | 1324.73 | 663.37 | 663.43 |
| 427 | 453 | Ac-F$r8AYWEAL$-NH2 | 1231.66 | 616.83 | 1232.93 |
| 428 | 454 | Ac-F$r8AYWAAL$-NH2 | 1173.66 | 587.83 | 1175.09 |
| 429 | 455 | Ac-F$r8AYWKAL$-NH2 | 1230.72 | 616.36 | 616.44 |
| 430 | 456 | Ac-F$r8AYWOAL$-NH2 | 1216.70 | 609.35 | 609.48 |
| 431 | 457 | Ac-F$r8AYWQAL$-NH2 | 1230.68 | 616.34 | 616.44 |
| 432 | 458 | Ac-F$r8AYWAQL$-NH2 | 1230.68 | 616.34 | 616.37 |
| 433 | 459 | Ac-F$r8HYWDQL$S-NH2 | 1427.72 | 714.86 | 714.86 |
| 434 | 460 | Ac-F$r8HFWEQL$S-NH2 | 1425.74 | 713.87 | 713.98 |
| 435 | 461 | Ac-F$r8AYWHQL$S-NH2 | 1383.73 | 692.87 | 692.96 |
| 436 | 462 | Ac-F$r8AYWKQL$S-NH2 | 1374.77 | 688.39 | 688.45 |
| 437 | 463 | Ac-F$r8AYWOQL$S-NH2 | 1360.75 | 681.38 | 681.49 |
| 438 | 464 | Ac-F$r8HYWSQL$S-NH2 | 1399.73 | 700.87 | 700.95 |
| 439 | 465 | Ac-F$r8HWWEQL$S-NH2 | 1464.76 | 733.38 | 733.44 |
| 440 | 466 | Ac-F$r8HWWAQL$S-NH2 | 1406.75 | 704.38 | 704.43 |
| 441 | 467 | Ac-F$r8AWWHQL$S-NH2 | 1406.75 | 704.38 | 704.43 |
| 442 | 468 | Ac-F$r8AWWKQL$S-NH2 | 1397.79 | 699.90 | 699.92 |
| 443 | 469 | Ac-F$r8AWWOQL$S-NH2 | 1383.77 | 692.89 | 692.96 |
| 444 | 470 | Ac-F$r8HWWSQL$S-NH2 | 1422.75 | 712.38 | 712.42 |
| 445 | 471 | Ac-LTF$r8NYWANleL$Q-NH2 | 1600.90 | 801.45 | 801.52 |
| 446 | 472 | Ac-LTF$r8NLWAQL$Q-NH2 | 1565.90 | 783.95 | 784.06 |
| 447 | 473 | Ac-LTF$r8NYWANleL$A-NH2 | 1543.88 | 772.94 | 773.03 |
| 448 | 474 | Ac-LTF$r8NLWAQL$A-NH2 | 1508.88 | 755.44 | 755.49 |
| 449 | 475 | Ac-LTF$r8AYWANleL$Q-NH2 | 1557.90 | 779.95 | 780.06 |
| 450 | 476 | Ac-LTF$r8ALWAQL$Q-NH2 | 1522.89 | 762.45 | 762.45 |
| 451 | 477 | Ac-LAF$r8NYWANleL$Q-NH2 | 1570.89 | 786.45 | 786.5 |
| 452 | 478 | Ac-LAF$r8NLWAQL$Q-NH2 | 1535.89 | 768.95 | 769.03 |
| 453 | 479 | Ac-LAF$r8AYWANleL$A-NH2 | 1470.86 | 736.43 | 736.47 |
| 454 | 480 | Ac-LAF$r8ALWAQL$A-NH2 | 1435.86 | 718.93 | 719.01 |
| 455 | 481 | Ac-LAF$r8AYWAAL$A-NH2 | 1428.82 | 715.41 | 715.41 |
| 456 | 482 | Ac-F$r8AYWEAc3cL$AAib-NH2 | 1399.75 | 700.88 | 700.95 |
| 457 | 483 | Ac-F$r8AYWAQL$AA-NH2 | 1372.75 | 687.38 | 687.78 |
| 458 | 484 | Ac-F$r8AYWAAc3cL$AA-NH2 | 1327.73 | 664.87 | 664.84 |
| 459 | 485 | Ac-F$r8AYWSAc3cL$AA-NH2 | 1343.73 | 672.87 | 672.9 |
| 460 | 486 | Ac-F$r8AYWEAc3cL$AS-NH2 | 1401.73 | 701.87 | 701.84 |
| 461 | 487 | Ac-F$r8AYWEAc3cL$AT-NH2 | 1415.75 | 708.88 | 708.87 |
| 462 | 488 | Ac-F$r8AYWEAc3cL$AL-NH2 | 1427.79 | 714.90 | 714.94 |
| 463 | 489 | Ac-F$r8AYWEAc3cL$AQ-NH2 | 1442.76 | 722.38 | 722.41 |
| 464 | 490 | Ac-F$r8AFWEAc3cL$AA-NH2 | 1369.74 | 685.87 | 685.93 |
| 465 | 491 | Ac-F$r8AWWEAc3cL$AA-NH2 | 1408.75 | 705.38 | 705.39 |
| 466 | 492 | Ac-F$r8AYWEAc3cL$SA-NH2 | 1401.73 | 701.87 | 701.99 |
| 467 | 493 | Ac-F$r8AYWEAL$AA-NH2 | 1373.74 | 687.87 | 687.93 |
| 468 | 494 | Ac-F$r8AYWENleL$AA-NH2 | 1415.79 | 708.90 | 708.94 |
| 469 | 495 | Ac-F$r8AYWEAc3cL$AbuA-NH2 | 1399.75 | 700.88 | 700.95 |
| 470 | 496 | Ac-F$r8AYWEAc3cL$NleA-NH2 | 1427.79 | 714.90 | 714.86 |
| 471 | 497 | Ac-F$r8AYWEAibL$NleA-NH2 | 1429.80 | 715.90 | 715.97 |
| 472 | 498 | Ac-F$r8AYWEAL$NleA-NH2 | 1415.79 | 708.90 | 708.94 |
| 473 | 499 | Ac-F$r8AYWENleL$NleA-NH2 | 1457.83 | 729.92 | 729.96 |
| 474 | 500 | Ac-F$r8AYWEAibL$Abu-NH2 | 1330.73 | 666.37 | 666.39 |
| 475 | 501 | Ac-F$r8AYWENleL$Abu-NH2 | 1358.76 | 680.38 | 680.39 |
| 476 | 502 | Ac-F$r8AYWEAL$Abu-NH2 | 1316.72 | 659.36 | 659.36 |
| 477 | 503 | Ac-LTF$r8AFWAQL$S-NH2 | 1515.85 | 758.93 | 759.12 |
| 478 | 504 | Ac-LTF$r8AWWAQL$S-NH2 | 1554.86 | 778.43 | 778.51 |
| 479 | 505 | Ac-LTF$r8AYWAQI$S-NH2 | 1531.84 | 766.92 | 766.96 |
| 480 | 506 | Ac-LTF$r8AYWAQNle$S-NH2 | 1531.84 | 766.92 | 766.96 |
| 481 | 507 | Ac-LTF$r8AYWAQL$SA-NH2 | 1602.88 | 802.44 | 802.48 |
| 482 | 508 | Ac-LTF$r8AWWAQL$A-NH2 | 1538.87 | 770.44 | 770.89 |
| 483 | 509 | Ac-LTF$r8AYWAQI$A-NH2 | 1515.85 | 758.93 | 759.42 |
| 484 | 510 | Ac-LTF$r8AYWAQNle$A-NH2 | 1515.85 | 758.93 | 759.42 |
| 485 | 511 | Ac-LTF$r8AYWAQL$AA-NH2 | 1586.89 | 794.45 | 794.94 |
| 486 | 512 | Ac-LTF$r8HWWAQL$S-NH2 | 1620.88 | 811.44 | 811.47 |
| 487 | 513 | Ac-LTF$r8HRWAQL$S-NH2 | 1590.90 | 796.45 | 796.52 |
| 488 | 514 | Ac-LTF$r8HKWAQL$S-NH2 | 1562.90 | 782.45 | 782.53 |
| 489 | 515 | Ac-LTF$r8HYWAQL$W-NH2 | 1696.91 | 849.46 | 849.5 |
| 491 | 516 | Ac-F$r8AYWAbuAL$A-NH2 | 1258.71 | 630.36 | 630.5 |
| 492 | 517 | Ac-F$r8AbuYWEAL$A-NH2 | 1316.72 | 659.36 | 659.51 |
| 493 | 518 | Ac-NlePRF%r8NYWRLL%QN-NH2 | 1954.13 | 978.07 | 978.54 |
| 494 | 519 | Ac-TSF%r8HYWAQL%S-NH2 | 1573.83 | 787.92 | 787.98 |
| 495 | 520 | Ac-LTF%r8AYWAQL%S-NH2 | 1533.86 | 767.93 | 768 |
| 496 | 521 | Ac-HTF$r8HYWAQL$S-NH2 | 1621.84 | 811.92 | 811.96 |
| 497 | 522 | Ac-LHF$r8HYWAQL$S-NH2 | 1633.88 | 817.94 | 818.02 |
| 498 | 523 | Ac-LTF$r8HHWAQL$S-NH2 | 1571.86 | 786.93 | 786.94 |
| 499 | 524 | Ac-LTF$r8HYWHQL$S-NH2 | 1663.89 | 832.95 | 832.38 |
| 500 | 525 | Ac-LTF$r8HYWAHL$S-NH2 | 1606.87 | 804.44 | 804.48 |
| 501 | 526 | Ac-LTF$r8HYWAQL$H-NH2 | 1647.89 | 824.95 | 824.98 |
| 502 | 527 | Ac-LTF$r8HYWAQL$S-NHPr | 1639.91 | 820.96 | 820.98 |
| 503 | 528 | Ac-LTF$r8HYWAQL$S-NHsBu | 1653.93 | 827.97 | 828.02 |
| 504 | 529 | Ac-LTF$r8HYWAQL$S-NHiBu | 1653.93 | 827.97 | 828.02 |
| 505 | 530 | Ac-LTF$r8HYWAQL$S-NHBn | 1687.91 | 844.96 | 844.44 |
| 506 | 531 | Ac-LTF$r8HYWAQL$S-NHPe | 1700.92 | 851.46 | 851.99 |
| 507 | 532 | Ac-LTF$r8HYWAQL$S-NHChx | 1679.94 | 840.97 | 841.04 |
| 508 | 533 | Ac-ETF$r8AYWAQL$S-NH2 | 1547.80 | 774.90 | 774.96 |
| 509 | 534 | Ac-STF$r8AYWAQL$S-NH2 | 1505.79 | 753.90 | 753.94 |
| 510 | 535 | Ac-LEF$r8AYWAQL$S-NH2 | 1559.84 | 780.92 | 781.25 |
| 511 | 536 | Ac-LSF$r8AYWAQL$S-NH2 | 1517.83 | 759.92 | 759.93 |
| 512 | 537 | Ac-LTF$r8EYWAQL$S-NH2 | 1589.85 | 795.93 | 795.97 |
| 513 | 538 | Ac-LTF$r8SYWAQL$S-NH2 | 1547.84 | 774.92 | 774.96 |
| 514 | 539 | Ac-LTF$r8AYWEQL$S-NH2 | 1589.85 | 795.93 | 795.9 |
| 515 | 540 | Ac-LTF$r8AYWAEL$S-NH2 | 1532.83 | 767.42 | 766.96 |
| 516 | 541 | Ac-LTF$r8AYWASL$S-NH2 | 1490.82 | 746.41 | 746.46 |
| 517 | 542 | Ac-LTF$r8AYWAQL$E-NH2 | 1573.85 | 787.93 | 787.98 |
| 518 | 543 | Ac-LTF2CN$r8HYWAQL$S-NH2 | 1622.86 | 812.43 | 812.47 |
| 519 | 544 | Ac-LTF3Cl$r8HYWAQL$S-NH2 | 1631.83 | 816.92 | 816.99 |
| 520 | 545 | Ac-LTDip$r8HYWAQL$S-NH2 | 1673.90 | 837.95 | 838.01 |
| 521 | 546 | Ac-LTF$r8HYWAQTle$S-NH2 | 1597.87 | 799.94 | 800.04 |
| 522 | 547 | Ac-F$r8AY6clWEAL$A-NH2 | 1336.66 | 669.33 | 1338.56 |
| 523 | 548 | Ac-F$r8AYdl6brWEAL$A-NH2 | 1380.61 | 691.31 | 692.2 |
| 524 | 549 | Ac-F$r8AYdl6fWEAL$A-NH2 | 1320.69 | 661.35 | 1321.61 |
| 525 | 550 | Ac-F$r8AYdl4mWEAL$A-NH2 | 1316.72 | 659.36 | 659.36 |
| 526 | 551 | Ac-F$r8AYdl5clWEAL$A-NH2 | 1336.66 | 669.33 | 669.35 |
| 527 | 552 | Ac-F$r8AYdl7mWEAL$A-NH2 | 1316.72 | 659.36 | 659.36 |
| 528 | 553 | Ac-LTF%r8HYWAQL%A-NH2 | 1583.89 | 792.95 | 793.01 |
| 529 | 554 | Ac-LTF$r8HCouWAQL$S-NH2 | 1679.87 | 840.94 | 841.38 |
| 530 | 555 | Ac-LTFEHCouWAQLTS-NH2 | 1617.75 | 809.88 | 809.96 |
| 531 | 556 | Ac-LTA$r8HCouWAQL$S-NH2 | 1603.84 | 802.92 | 803.36 |
| 532 | 557 | Ac-F$r8AYWEAL$AbuA-NH2 | 1387.75 | 694.88 | 694.88 |
| 533 | 558 | Ac-F$r8AYWEAI$AA-NH2 | 1373.74 | 687.87 | 687.93 |
| 534 | 559 | Ac-F$r8AYWEANle$AA-NH2 | 1373.74 | 687.87 | 687.93 |
| 535 | 560 | Ac-F$r8AYWEAmlL$AA-NH2 | 1429.80 | 715.90 | 715.97 |
| 536 | 561 | Ac-F$r8AYWQAL$AA-NH2 | 1372.75 | 687.38 | 687.48 |
| 537 | 562 | Ac-F$r8AYWAAL$AA-NH2 | 1315.73 | 658.87 | 658.92 |
| 538 | 563 | Ac-F$r8AYWAbuAL$AA-NH2 | 1329.75 | 665.88 | 665.95 |
| 539 | 564 | Ac-F$r8AYWNleAL$AA-NH2 | 1357.78 | 679.89 | 679.94 |
| 540 | 565 | Ac-F$r8AbuYWEAL$AA-NH2 | 1387.75 | 694.88 | 694.96 |
| 541 | 566 | Ac-F$r8NleYWEAL$AA-NH2 | 1415.79 | 708.90 | 708.94 |
| 542 | 567 | Ac-F$r8FYWEAL$AA-NH2 | 1449.77 | 725.89 | 725.97 |
| 543 | 568 | Ac-LTF$r8HYWAQhL$S-NH2 | 1611.88 | 806.94 | 807 |
| 544 | 569 | Ac-LTF$r8HYWAQAdm$S-NH2 | 1675.91 | 838.96 | 839.04 |
| 545 | 570 | Ac-LTF$r8HYWAQIgl$S-NH2 | 1659.88 | 830.94 | 829.94 |
| 546 | 571 | Ac-F$r8AYWAQL$AA-NH2 | 1372.75 | 687.38 | 687.48 |
| 547 | 572 | Ac-LTF$r8ALWAQL$Q-NH2 | 1522.89 | 762.45 | 762.52 |
| 548 | 573 | Ac-F$r8AYWEAL$AA-NH2 | 1373.74 | 687.87 | 687.93 |
| 549 | 574 | Ac-F$r8AYWENleL$AA-NH2 | 1415.79 | 708.90 | 708.94 |
| 550 | 575 | Ac-F$r8AYWEAibL$Abu-NH2 | 1330.73 | 666.37 | 666.39 |
| 551 | 576 | Ac-F$r8AYWENleL$Abu-NH2 | 1358.76 | 680.38 | 680.38 |
| 552 | 577 | Ac-F$r8AYWEAL$Abu-NH2 | 1316.72 | 659.36 | 659.36 |
| 553 | 578 | Ac-F$r8AYWEAc3cL$AbuA-NH2 | 1399.75 | 700.88 | 700.95 |
| 554 | 579 | Ac-F$r8AYWEAc3cL$NleA-NH2 | 1427.79 | 714.90 | 715.01 |
| 555 | 580 | H-LTF$r8AYWAQL$S-NH2 | 1489.83 | 745.92 | 745.95 |
| 556 | 581 | mdPEG3-LTF$r8AYWAQL$S-NH2 | 1679.92 | 840.96 | 840.97 |
| 557 | 582 | mdPEG7-LTF$r8AYWAQL$S-NH2 | 1856.02 | 929.01 | 929.03 |
| 558 | 583 | Ac-F$r8ApmpEt6clWEAL$A-NH2 | 1470.71 | 736.36 | 788.17 |
| 559 | 584 | Ac-LTF3Cl$r8AYWAQL$S-NH2 | 1565.81 | 783.91 | 809.18 |
| 560 | 585 | Ac-LTF3Cl$r8HYWAQL$A-NH2 | 1615.83 | 808.92 | 875.24 |
| 561 | 586 | Ac-LTF3Cl$r8HYWWQL$S-NH2 | 1746.87 | 874.44 | 841.65 |
| 562 | 587 | Ac-LTF3Cl$r8AYWWQL$S-NH2 | 1680.85 | 841.43 | 824.63 |
| 563 | 588 | Ac-LTF$r8AYWWQL$S-NH2 | 1646.89 | 824.45 | 849.98 |
| 564 | 589 | Ac-LTF$r8HYWWQL$A-NH2 | 1696.91 | 849.46 | 816.67 |
| 565 | 590 | Ac-LTF$r8AYWWQL$A-NH2 | 1630.89 | 816.45 | 776.15 |
| 566 | 591 | Ac-LTF4F$r8AYWAQL$S-NH2 | 1549.83 | 775.92 | 776.15 |
| 567 | 592 | Ac-LTF2F$r8AYWAQL$S-NH2 | 1549.83 | 775.92 | 776.15 |
| 568 | 593 | Ac-LTF3F$r8AYWAQL$S-NH2 | 1549.83 | 775.92 | 785.12 |
| 569 | 594 | Ac-LTF34F2$r8AYWAQL$S-NH2 | 1567.83 | 784.92 | 785.12 |
| 570 | 595 | Ac-LTF35F2$r8AYWAQL$S-NH2 | 1567.83 | 784.92 | 1338.74 |
| 571 | 596 | Ac-F3Cl$r8AYWEAL$A-NH2 | 1336.66 | 669.33 | 705.28 |
| 572 | 597 | Ac-F3Cl$r8AYWEAL$AA-NH2 | 1407.70 | 704.85 | 680.11 |
| 573 | 598 | Ac-F$r8AY6clWEAL$AA-NH2 | 1407.70 | 704.85 | 736.83 |
| 574 | 599 | Ac-F$r8AY6clWEAL$-NH2 | 1265.63 | 633.82 | 784.1 |
| 575 | 600 | Ac-LTF$r8HYWAQLSt/S-NH2 | 16.03 | 9.02 | 826.98 |
| 576 | 601 | Ac-LTF$r8HYWAQL$S-NHsBu | 1653.93 | 827.97 | 828.02 |
| 577 | 602 | Ac-STF$r8AYWAQL$S-NH2 | 1505.79 | 753.90 | 753.94 |
| 578 | 603 | Ac-LTF$r8AYWAEL$S-NH2 | 1532.83 | 767.42 | 767.41 |
| 579 | 604 | Ac-LTF$r8AYWAQL$E-NH2 | 1573.85 | 787.93 | 787.98 |
| 580 | 605 | mdPEG3-LTF$r8AYWAQL$S-NH2 | 1679.92 | 840.96 | 840.97 |
| 581 | 606 | Ac-LTF$r8AYWAQhL$S-NH2 | 1545.86 | 773.93 | 774.31 |
| 583 | 607 | Ac-LTF$r8AYWAQCha$S-NH2 | 1571.88 | 786.94 | 787.3 |
| 584 | 608 | Ac-LTF$r8AYWAQChg$S-NH2 | 1557.86 | 779.93 | 780.4 |
| 585 | 609 | Ac-LTF$r8AYWAQCba$S-NH2 | 1543.84 | 772.92 | 780.13 |
| 586 | 610 | Ac-LTF$r8AYWAQF$S-NH2 | 1565.83 | 783.92 | 784.2 |
| 587 | 611 | Ac-LTF4F$r8HYWAQhL$S-NH2 | 1629.87 | 815.94 | 815.36 |
| 588 | 612 | Ac-LTF4F$r8HYWAQCha$S-NH2 | 1655.89 | 828.95 | 828.39 |
| 589 | 613 | Ac-LTF4F$r8HYWAQChg$S-NH2 | 1641.87 | 821.94 | 821.35 |
| 590 | 614 | Ac-LTF4F$r8HYWAQCba$S-NH2 | 1627.86 | 814.93 | 814.32 |
| 591 | 615 | Ac-LTF4F$r8AYWAQhL$S-NH2 | 1563.85 | 782.93 | 782.36 |
| 592 | 616 | Ac-LTF4F$r8AYWAQCha$S-NH2 | 1589.87 | 795.94 | 795.38 |
| 593 | 617 | Ac-LTF4F$r8AYWAQChg$S-NH2 | 1575.85 | 788.93 | 788.35 |
| 594 | 618 | Ac-LTF4F$r8AYWAQCba$S-NH2 | 1561.83 | 781.92 | 781.39 |
| 595 | 619 | Ac-LTF3Cl$r8AYWAQhL$S-NH2 | 1579.82 | 790.91 | 790.35 |
| 596 | 620 | Ac-LTF3Cl$r8AYWAQCha$S-NH2 | 1605.84 | 803.92 | 803.67 |
| 597 | 621 | Ac-LTF3Cl$r8AYWAQChg$S-NH2 | 1591.82 | 796.91 | 796.34 |
| 598 | 622 | Ac-LTF3Cl$r8AYWAQCba$S-NH2 | 1577.81 | 789.91 | 789.39 |
| 599 | 623 | Ac-LTF$r8AYWAQhF$S-NH2 | 1579.84 | 790.92 | 791.14 |
| 600 | 624 | Ac-LTF$r8AYWAQF3CF3$S-NH2 | 1633.82 | 817.91 | 818.15 |
| 601 | 625 | Ac-LTF$r8AYWAQF3Me$S-NH2 | 1581.86 | 791.93 | 791.32 |
| 602 | 626 | Ac-LTF$r8AYWAQ1Nal$S-NH2 | 1615.84 | 808.92 | 809.18 |
| 603 | 627 | Ac-LTF$r8AYWAQBip$S-NH2 | 1641.86 | 821.93 | 822.13 |
| 604 | 628 | Ac-LTF$r8FYWAQL$A-NH2 | 1591.88 | 796.94 | 797.33 |
| 605 | 629 | Ac-LTF$r8HYWAQL$S-NHAm | 1667.94 | 834.97 | 835.92 |
| 606 | 630 | Ac-LTF$r8HYWAQL$S-NHiAm | 1667.94 | 834.97 | 835.55 |
| 607 | 631 | Ac-LTF$r8HYWAQL$S-NHnPr3Ph | 1715.94 | 858.97 | 859.79 |
| 608 | 632 | Ac-LTF$r8HYWAQL$S-NHnBu3,3Me | 1681.96 | 841.98 | 842.49 |
| 610 | 633 | Ac-LTF$r8HYWAQL$S-NHnPr | 1639.91 | 820.96 | 821.58 |
| 611 | 634 | Ac-LTF$r8HYWAQL$S-NHnEt2Ch | 1707.98 | 854.99 | 855.35 |
| 612 | 635 | Ac-LTF$r8HYWAQL$S-NHHex | 1681.96 | 841.98 | 842.4 |
| 613 | 636 | Ac-LTF$r8AYWAQL$S-NHmdPeg2 | 1633.91 | 817.96 | 818.35 |
| 614 | 637 | Ac-LTF$r8AYWAQL$A-NHmdPeg2 | 1617.92 | 809.96 | 810.3 |
| 615 | 638 | Ac-LTF$r8AYWAQL$A-NHmdPeg4 | 1705.97 | 853.99 | 854.33 |
| 616 | 639 | Ac-F$r8AYdl4mWEAL$A-NH2 | 1316.72 | 659.36 | 659.44 |
| 617 | 640 | Ac-F$r8AYdl5clWEAL$A-NH2 | 1336.66 | 669.33 | 669.43 |
| 618 | 641 | Ac-LThF$r8AYWAQL$S-NH2 | 1545.86 | 773.93 | 774.11 |
| 619 | 642 | Ac-LT2Nal$r8AYWAQL$S-NH2 | 1581.86 | 791.93 | 792.43 |
| 620 | 643 | Ac-LTA$r8AYWAQL$S-NH2 | 1455.81 | 728.91 | 729.15 |
| 621 | 644 | Ac-LTF$r8AYWVQL$S-NH2 | 1559.88 | 780.94 | 781.24 |
| 622 | 645 | Ac-LTF$r8HYWAAL$A-NH2 | 1524.85 | 763.43 | 763.86 |
| 623 | 646 | Ac-LTF$r8VYWAQL$A-NH2 | 1543.88 | 772.94 | 773.37 |
| 624 | 647 | Ac-LTF$r8IYWAQL$S-NH2 | 1573.89 | 787.95 | 788.17 |
| 625 | 648 | Ac-FTF$r8VYWSQL$S-NH2 | 1609.85 | 805.93 | 806.22 |
| 626 | 649 | Ac-ITF$r8FYWAQL$S-NH2 | 1607.88 | 804.94 | 805.2 |
| 627 | 650 | Ac-2NalTF$r8VYWSQL$S-NH2 | 1659.87 | 830.94 | 831.2 |
| 628 | 651 | Ac-ITF$r8LYWSQL$S-NH2 | 1589.89 | 795.95 | 796.13 |
| 629 | 652 | Ac-FTF$r8FYWAQL$S-NH2 | 1641.86 | 821.93 | 822.13 |
| 630 | 653 | Ac-WTF$r8VYWAQL$S-NH2 | 1632.87 | 817.44 | 817.69 |
| 631 | 654 | Ac-WTF$r8WYWAQL$S-NH2 | 1719.88 | 860.94 | 861.36 |
| 632 | 655 | Ac-VTF$r8AYWSQL$S-NH2 | 1533.82 | 767.91 | 768.19 |
| 633 | 656 | Ac-WTF$r8FYWSQL$S-NH2 | 1696.87 | 849.44 | 849.7 |
| 634 | 657 | Ac-FTF$r8IYWAQL$S-NH2 | 1607.88 | 804.94 | 805.2 |
| 635 | 658 | Ac-WTF$r8VYWSQL$S-NH2 | 1648.87 | 825.44 | 824.8 |
| 636 | 659 | Ac-FTF$r8LYWSQL$S-NH2 | 1623.87 | 812.94 | 812.8 |
| 637 | 660 | Ac-YTF$r8FYWSQL$S-NH2 | 1673.85 | 837.93 | 837.8 |
| 638 | 661 | Ac-LTF$r8AY6clWEAL$A-NH2 | 1550.79 | 776.40 | 776.14 |
| 639 | 662 | Ac-LTF$r8AY6clWSQL$S-NH2 | 1581.80 | 791.90 | 791.68 |
| 640 | 663 | Ac-F$r8AY6clWSAL$A-NH2 | 1294.65 | 648.33 | 647.67 |
| 641 | 664 | Ac-F$r8AY6clWQAL$AA-NH2 | 1406.72 | 704.36 | 703.84 |
| 642 | 665 | Ac-LHF$r8AYWAQL$S-NH2 | 1567.86 | 784.93 | 785.21 |
| 643 | 666 | Ac-LTF$r8AYWAQL$S-NH2 | 1531.84 | 766.92 | 767.17 |
| 644 | 667 | Ac-LTF$r8AHWAQL$S-NH2 | 1505.84 | 753.92 | 754.13 |
| 645 | 668 | Ac-LTF$r8AYWAHL$S-NH2 | 1540.84 | 771.42 | 771.61 |
| 646 | 669 | Ac-LTF$r8AYWAQL$H-NH2 | 1581.87 | 791.94 | 792.15 |
| 647 | 670 | H-LTF$r8AYWAQL$A-NH2 | 1473.84 | 737.92 | 737.29 |
| 648 | 671 | Ac-HHF$r8AYWAQL$S-NH2 | 1591.83 | 796.92 | 797.35 |
| 649 | 672 | Ac-aAibWTF$r8VYWSQL$S-NH2 | 1804.96 | 903.48 | 903.64 |
| 650 | 673 | Ac-AibWTF$r8HYWAQL$S-NH2 | 1755.91 | 878.96 | 879.4 |
| 651 | 674 | Ac-AibAWTF$r8HYWAQL$S-NH2 | 1826.95 | 914.48 | 914.7 |
| 652 | 675 | Ac-fWTF$r8HYWAQL$S-NH2 | 1817.93 | 909.97 | 910.1 |
| 653 | 676 | Ac-AibWWTF$r8HYWAQL$S-NH2 | 1941.99 | 972.00 | 972.2 |
| 654 | 677 | Ac-WTF$r8LYWSQL$S-NH2 | 1662.88 | 832.44 | 832.8 |
| 655 | 678 | Ac-WTF$r8NleYWSQL$S-NH2 | 1662.88 | 832.44 | 832.6 |
| 656 | 679 | Ac-LTF$r8AYWSQL$a-NH2 | 1531.84 | 766.92 | 767.2 |
| 657 | 680 | Ac-LTF$r8EYWARL$A-NH2 | 1601.90 | 801.95 | 802.1 |
| 658 | 681 | Ac-LTF$r8EYWAHL$A-NH2 | 1582.86 | 792.43 | 792.6 |
| 659 | 682 | Ac-aTF$r8AYWAQL$S-NH2 | 1489.80 | 745.90 | 746.08 |
| 660 | 683 | Ac-AibTF$r8AYWAQL$S-NH2 | 1503.81 | 752.91 | 753.11 |
| 661 | 684 | Ac-AmfTF$r8AYWAQL$S-NH2 | 1579.84 | 790.92 | 791.14 |
| 662 | 685 | Ac-AmwTF$r8AYWAQL$S-NH2 | 1618.86 | 810.43 | 810.66 |
| 663 | 686 | Ac-NmLTF$r8AYWAQL$S-NH2 | 1545.86 | 773.93 | 774.11 |
| 664 | 687 | Ac-LNmTF$r8AYWAQL$S-NH2 | 1545.86 | 773.93 | 774.11 |
| 665 | 688 | Ac-LSarF$r8AYWAQL$S-NH2 | 1501.83 | 751.92 | 752.18 |
| 667 | 689 | Ac-LGF$r8AYWAQL$S-NH2 | 1487.82 | 744.91 | 745.15 |
| 668 | 690 | Ac-LTNmF$r8AYWAQL$S-NH2 | 1545.86 | 773.93 | 774.2 |
| 669 | 691 | Ac-TF$r8AYWAQL$S-NH2 | 1418.76 | 710.38 | 710.64 |
| 670 | 692 | Ac-ETF$r8AYWAQL$A-NH2 | 1531.81 | 766.91 | 767.2 |
| 671 | 693 | Ac-LTF$r8EYWAQL$A-NH2 | 1573.85 | 787.93 | 788.1 |
| 672 | 694 | Ac-LT2Nal$r8AYWSQL$S-NH2 | 1597.85 | 799.93 | 800.4 |
| 673 | 695 | Ac-LTF$r8AYWAAL$S-NH2 | 1474.82 | 738.41 | 738.68 |
| 674 | 696 | Ac-LTF$r8AYWAQhCha$S-NH2 | 1585.89 | 793.95 | 794.19 |
| 675 | 697 | Ac-LTF$r8AYWAQChg$S-NH2 | 1557.86 | 779.93 | 780.97 |
| 676 | 698 | Ac-LTF$r8AYWAQCba$S-NH2 | 1543.84 | 772.92 | 773.19 |
| 677 | 699 | Ac-LTF$r8AYWAQF3CF3$S-NH2 | 1633.82 | 817.91 | 818.15 |
| 678 | 700 | Ac-LTF$r8AYWAQ1Nal$S-NH2 | 1615.84 | 808.92 | 809.18 |
| 679 | 701 | Ac-LTF$r8AYWAQBip$S-NH2 | 1641.86 | 821.93 | 822.32 |
| 680 | 702 | Ac-LT2Nal$r8AYWAQL$S-NH2 | 1581.86 | 791.93 | 792.15 |
| 681 | 703 | Ac-LTF$r8AYWVQL$S-NH2 | 1559.88 | 780.94 | 781.62 |
| 682 | 704 | Ac-LTF$r8AWWAQL$S-NH2 | 1554.86 | 778.43 | 778.65 |
| 683 | 705 | Ac-FTF$r8VYWSQL$S-NH2 | 1609.85 | 805.93 | 806.12 |
| 684 | 706 | Ac-ITF$r8FYWAQL$S-NH2 | 1607.88 | 804.94 | 805.2 |
| 685 | 707 | Ac-ITF$r8LYWSQL$S-NH2 | 1589.89 | 795.95 | 796.22 |
| 686 | 708 | Ac-FTF$r8FYWAQL$S-NH2 | 1641.86 | 821.93 | 822.41 |
| 687 | 709 | Ac-VTF$r8AYWSQL$S-NH2 | 1533.82 | 767.91 | 768.19 |
| 688 | 710 | Ac-LTF$r8AHWAQL$S-NH2 | 1505.84 | 753.92 | 754.31 |
| 689 | 711 | Ac-LTF$r8AYWAQL$H-NH2 | 1581.87 | 791.94 | 791.94 |
| 690 | 712 | Ac-LTF$r8AYWAHL$S-NH2 | 1540.84 | 771.42 | 771.61 |
| 691 | 713 | Ac-aAibWTF$r8VYWSQL$S-NH2 | 1804.96 | 903.48 | 903.9 |
| 692 | 714 | Ac-AibWTF$r8HYWAQL$S-NH2 | 1755.91 | 878.96 | 879.5 |
| 693 | 715 | Ac-AibAWTF$r8HYWAQL$S-NH2 | 1826.95 | 914.48 | 914.7 |
| 694 | 716 | Ac-fWTF$r8HYWAQL$S-NH2 | 1817.93 | 909.97 | 910.2 |
| 695 | 717 | Ac-AibWWTF$r8HYWAQL$S-NH2 | 1941.99 | 972.00 | 972.7 |
| 696 | 718 | Ac-WTF$r8LYWSQL$S-NH2 | 1662.88 | 832.44 | 832.7 |
| 697 | 719 | Ac-WTF$r8NleYWSQL$S-NH2 | 1662.88 | 832.44 | 832.7 |
| 698 | 720 | Ac-LTF$r8AYWSQL$a-NH2 | 1531.84 | 766.92 | 767.2 |
| 699 | 721 | Ac-LTF$r8EYWARL$A-NH2 | 1601.90 | 801.95 | 802.2 |
| 700 | 722 | Ac-LTF$r8EYWAHL$A-NH2 | 1582.86 | 792.43 | 792.6 |
| 701 | 723 | Ac-aTF$r8AYWAQL$S-NH2 | 1489.80 | 745.90 | 746.1 |
| 702 | 724 | Ac-AibTF$r8AYWAQL$S-NH2 | 1503.81 | 752.91 | 753.2 |
| 703 | 725 | Ac-AmfTF$r8AYWAQL$S-NH2 | 1579.84 | 790.92 | 791.2 |
| 704 | 726 | Ac-AmwTF$r8AYWAQL$S-NH2 | 1618.86 | 810.43 | 810.7 |
| 705 | 727 | Ac-NmLTF$r8AYWAQL$S-NH2 | 1545.86 | 773.93 | 774.1 |
| 706 | 728 | Ac-LNmTF$r8AYWAQL$S-NH2 | 1545.86 | 773.93 | 774.4 |
| 707 | 729 | Ac-LSarF$r8AYWAQL$S-NH2 | 1501.83 | 751.92 | 752.1 |
| 708 | 730 | Ac-TF$r8AYWAQL$S-NH2 | 1418.76 | 710.38 | 710.8 |
| 709 | 731 | Ac-ETF$r8AYWAQL$A-NH2 | 1531.81 | 766.91 | 767.4 |
| 710 | 732 | Ac-LTF$r8EYWAQL$A-NH2 | 1573.85 | 787.93 | 788.2 |
| 711 | 733 | Ac-WTF$r8VYWSQL$S-NH2 | 1648.87 | 825.44 | 825.2 |
| 713 | 734 | Ac-YTF$r8FYWSQL$S-NH2 | 1673.85 | 837.93 | 837.3 |
| 714 | 735 | Ac-F$r8AY6clWSAL$A-NH2 | 1294.65 | 648.33 | 647.74 |
| 715 | 736 | Ac-ETF$r8EYWVQL$S-NH2 | 1633.84 | 817.92 | 817.36 |
| 716 | 737 | Ac-ETF$r8EHWAQL$A-NH2 | 1563.81 | 782.91 | 782.36 |
| 717 | 738 | Ac-ITF$r8EYWAQL$S-NH2 | 1589.85 | 795.93 | 795.38 |
| 718 | 739 | Ac-ITF$r8EHWVQL$A-NH2 | 1575.88 | 788.94 | 788.42 |
| 719 | 740 | Ac-ITF$r8EHWAQL$S-NH2 | 1563.85 | 782.93 | 782.43 |
| 720 | 741 | Ac-LTF4F$r8AYWAQCba$S-NH2 | 1561.83 | 781.92 | 781.32 |
| 721 | 742 | Ac-LTF3Cl$r8AYWAQhL$S-NH2 | 1579.82 | 790.91 | 790.64 |
| 722 | 743 | Ac-LTF3Cl$r8AYWAQCha$S-NH2 | 1605.84 | 803.92 | 803.37 |
| 723 | 744 | Ac-LTF3Cl$r8AYWAQChg$S-NH2 | 1591.82 | 796.91 | 796.27 |
| 724 | 745 | Ac-LTF3Cl$r8AYWAQCba$S-NH2 | 1577.81 | 789.91 | 789.83 |
| 725 | 746 | Ac-LTF$r8AY6clWSQL$S-NH2 | 1581.80 | 791.90 | 791.75 |
| 726 | 747 | Ac-LTF4F$r8HYWAQhL$S-NH2 | 1629.87 | 815.94 | 815.36 |
| 727 | 748 | Ac-LTF4F$r8HYWAQCba$S-NH2 | 1627.86 | 814.93 | 814.32 |
| 728 | 749 | Ac-LTF4F$r8AYWAQhL$S-NH2 | 1563.85 | 782.93 | 782.36 |
| 729 | 750 | Ac-LTF4F$r8AYWAQChg$S-NH2 | 1575.85 | 788.93 | 788.35 |
| 730 | 751 | Ac-ETF$r8EYWVAL$S-NH2 | 1576.82 | 789.41 | 788.79 |
| 731 | 752 | Ac-ETF$r8EHWAAL$A-NH2 | 1506.79 | 754.40 | 754.8 |
| 732 | 753 | Ac-ITF$r8EYWAAL$S-NH2 | 1532.83 | 767.42 | 767.75 |
| 733 | 754 | Ac-ITF$r8EHWVAL$A-NH2 | 1518.86 | 760.43 | 760.81 |
| 734 | 755 | Ac-ITF$r8EHWAAL$S-NH2 | 1506.82 | 754.41 | 754.8 |
| 735 | 756 | Pam-LTF$r8EYWAQL$S-NH2 | 1786.07 | 894.04 | 894.48 |
| 736 | 757 | Pam-ETF$r8EYWAQL$S-NH2 | 1802.03 | 902.02 | 902.34 |
| 737 | 758 | Ac-LTF$r8AYWLQL$S-NH2 | 1573.89 | 787.95 | 787.39 |
| 738 | 759 | Ac-LTF$r8EYWLQL$S-NH2 | 1631.90 | 816.95 | 817.33 |
| 739 | 760 | Ac-LTF$r8EHWLQL$S-NH2 | 1605.89 | 803.95 | 804.29 |
| 740 | 761 | Ac-LTF$r8VYWAQL$S-NH2 | 1559.88 | 780.94 | 781.34 |
| 741 | 762 | Ac-LTF$r8AYWSQL$S-NH2 | 1547.84 | 774.92 | 775.33 |
| 742 | 763 | Ac-ETF$r8AYWAQL$S-NH2 | 1547.80 | 774.90 | 775.7 |
| 743 | 764 | Ac-LTF$r8EYWAQL$S-NH2 | 1589.85 | 795.93 | 796.33 |
| 744 | 765 | Ac-LTF$r8HYWAQL$S-NHAm | 1667.94 | 834.97 | 835.37 |
| 745 | 766 | Ac-LTF$r8HYWAQL$S-NHiAm | 1667.94 | 834.97 | 835.27 |
| 746 | 767 | Ac-LTF$r8HYWAQL$S-NHnPr3Ph | 1715.94 | 858.97 | 859.42 |
| 747 | 768 | Ac-LTF$r8HYWAQL$S-NHnBu3,3Me | 1681.96 | 841.98 | 842.67 |
| 748 | 769 | Ac-LTF$r8HYWAQL$S-NHnBu | 1653.93 | 827.97 | 828.24 |
| 749 | 770 | Ac-LTF$r8HYWAQL$S-NHnPr | 1639.91 | 820.96 | 821.31 |
| 750 | 771 | Ac-LTF$r8HYWAQL$S-NHnEt2Ch | 1707.98 | 854.99 | 855.35 |
| 751 | 772 | Ac-LTF$r8HYWAQL$S-NHHex | 1681.96 | 841.98 | 842.4 |
| 752 | 773 | Ac-LTF$r8AYWAQL$S-NHmdPeg2 | 1633.91 | 817.96 | 855.35 |
| 753 | 774 | Ac-LTF$r8AYWAQL$A-NHmdPeg2 | 1617.92 | 809.96 | 810.58 |
| 754 | 775 | Ac-LTF$r5AYWAAL$s8S-NH2 | 1474.82 | 738.41 | 738.79 |
| 755 | 776 | Ac-LTF$r8AYWCouQL$S-NH2 | 1705.88 | 853.94 | 854.61 |
| 756 | 777 | Ac-LTF$r8CouYWAQL$S-NH2 | 1705.88 | 853.94 | 854.7 |
| 757 | 778 | Ac-CouTF$r8AYWAQL$S-NH2 | 1663.83 | 832.92 | 833.33 |
| 758 | 779 | H-LTF$r8AYWAQL$A-NH2 | 1473.84 | 737.92 | 737.29 |
| 759 | 780 | Ac-HHF$r8AYWAQL$S-NH2 | 1591.83 | 796.92 | 797.72 |
| 760 | 781 | Ac-LT2Nal$r8AYWSQL$S-NH2 | 1597.85 | 799.93 | 800.68 |
| 761 | 782 | Ac-LTF$r8HCouWAQL$S-NH2 | 1679.87 | 840.94 | 841.38 |
| 762 | 783 | Ac-LTF$r8AYWCou2QL$S-NH2 | 1789.94 | 895.97 | 896.51 |
| 763 | 784 | Ac-LTF$r8Cou2YWAQL$S-NH2 | 1789.94 | 895.97 | 896.5 |
| 764 | 785 | Ac-Cou2TF$r8AYWAQL$S-NH2 | 1747.90 | 874.95 | 875.42 |
| 765 | 786 | Ac-LTF$r8ACou2WAQL$S-NH2 | 1697.92 | 849.96 | 850.82 |
| 766 | 787 | Dmaac-LTF$r8AYWAQL$S-NH2 | 1574.89 | 788.45 | 788.82 |
| 767 | 788 | Hexac-LTF$r8AYWAQL$S-NH2 | 1587.91 | 794.96 | 795.11 |
| 768 | 789 | Napac-LTF$r8AYWAQL$S-NH2 | 1657.89 | 829.95 | 830.36 |
| 769 | 790 | Pam-LTF$r8AYWAQL$S-NH2 | 1728.06 | 865.03 | 865.45 |
| 770 | 791 | Ac-LT2Nal$r8HYAAQL$S-NH2 | 1532.84 | 767.42 | 767.61 |
| 771 | 792 | Ac-LT2Nal$/r8HYWAQL$/S-NH2 | 1675.91 | 838.96 | 839.1 |
| 772 | 793 | Ac-LT2Nal$r8HYFAQL$S-NH2 | 1608.87 | 805.44 | 805.9 |
| 773 | 794 | Ac-LT2Nal$r8HWAAQL$S-NH2 | 1555.86 | 778.93 | 779.08 |
| 774 | 795 | Ac-LT2Nal$r8HYAWQL$S-NH2 | 1647.88 | 824.94 | 825.04 |
| 775 | 796 | Ac-LT2Nal$r8HYAAQW$S-NH2 | 1605.83 | 803.92 | 804.05 |
| 776 | 797 | Ac-LTW$r8HYWAQL$S-NH2 | 1636.88 | 819.44 | 819.95 |
| 777 | 798 | Ac-LT1Nal$r8HYWAQL$S-NH2 | 1647.88 | 824.94 | 825.41 |

[0505] In the sequences shown above and elsewhere, the following abbreviations are used: “Nle” represents norleucine, “Aib” represents 2-aminoisobutyric acid, “Ac” represents acetyl, and “Pr” represents propionyl. Amino acids represented as “$” are alpha-Me S5-pentenyl-alanine olefin amino acids connected by an all-carbon i to i+4 crosslinker comprising one double bond. Amino acids represented as “$r5” are alpha-Me R5-pentenyl-alanine olefin amino acids connected by an all-carbon i to i+4 crosslinker comprising one double bond. Amino acids represented as “$s8” are alpha-Me S8-octenyl-alanine olefin amino acids connected by an all-carbon i to i+7 crosslinker comprising one double bond. Amino acids represented as “$r8” are alpha-Me R8-octenyl-alanine olefin amino acids connected by an all-carbon i to i+7 crosslinker comprising one double bond. “Ahx” represents an aminocyclohexyl linker. The crosslinkers are linear all-carbon crosslinker comprising eight or eleven carbon atoms between the alpha carbons of each amino acid. Amino acids represented as “$/” are alpha-Me S5-pentenyl-alanine olefin amino acids that are not connected by any crosslinker. Amino acids represented as “$/r5” are alpha-Me R5-pentenyl-alanine olefin amino acids that are not connected by any crosslinker. Amino acids represented as “$/s8” are alpha-Me S8-octenyl-alanine olefin amino acids that are not connected by any crosslinker. Amino acids represented as “$/r8” are alpha-Me R8-octenyl-alanine olefin amino acids that are not connected by any crosslinker. Amino acids represented as “Amw” are alpha-Me tryptophan amino acids. Amino acids represented as “Aml” are alpha-Me leucine amino acids. Amino acids represented as “2ff” are 2-fluoro-phenylalanine amino acids. Amino acids represented as “3ff” are 3-fluoro-phenylalanine amino acids. Amino acids represented as “St” are amino acids comprising two pentenyl-alanine olefin side chains, each of which is crosslinked to another amino acid as indicated. Amino acids represented as “SW” are amino acids comprising two pentenyl-alanine olefin side chains that are not crosslinked. Amino acids represented as “% St” are amino acids comprising two pentenyl-alanine olefin side chains, each of which is crosslinked to another amino acid as indicated via fully saturated hydrocarbon crosslinks.

[0506] For example, the compounds represented as SP-72, SP-56 and SP-138 have the following structures (SEQ ID NOS 113, 97, 177, 87, 181, 307, 167, 229, 277, 370, 221, 217, 391 and 188, respectively, in order of appearance):

[chemical structure]

[0507] For example, additional compounds have the following structures:

[chemical structure]

[chemical structure]

[chemical structure]

[0508] Tables 10-13 show a selection of peptidomimetic macrocycles.

TABLE 10

| | SEQ | | | Exact | Found | Calc | Calc | Calc |
|---|---|---|---|---|---|---|---|---|
| SP | ID NO: | Sequence | Isomer | Mass | Mass | (M + 1)/1 | (M + 2)/2 | (M + 3)/3 |
| SP1 | 799 | Ac-F$r8AYWEAc3cL$AAA-NH2 | | 1456.78 | 729.44 | 1457.79 | 729.4 | 486.6 |
| SP2 | 800 | Ac-F$r8AYWEAc3cL$AAibA-NH2 | | 1470.79 | 736.4 | 1471.8 | 736.4 | 491.27 |
| SP3 | 801 | Ac-LTF$r8AYWAQL$SANle-NH2 | | 1715.97 | 859.02 | 1716.98 | 858.99 | 573 |
| SP4 | 802 | Ac-LTF$r8AYWAQL$SAL-NH2 | | 1715.97 | 859.02 | 1716.98 | 858.99 | 573 |
| SP5 | 803 | Ac-LTF$r8AYWAQL$SAM-NH2 | | 1733.92 | 868.48 | 1734.93 | 867.97 | 578.98 |
| SP6 | 804 | Ac-LTF$r8AYWAQL$SAhL-NH2 | | 1729.98 | 865.98 | 1730.99 | 866 | 577.67 |
| SP7 | 805 | Ac-LTF$r8AYWAQL$SAF-NH2 | | 1749.95 | 876.36 | 1750.96 | 875.98 | 584.32 |
| SP8 | 806 | Ac-LTF$r8AYWAQL$SAI-NH2 | | 1715.97 | 859.02 | 1716.98 | 858.99 | 573 |
| SP9 | 807 | Ac-LTF$r8AYWAQL$SAChg-NH2 | | 1741.98 | 871.98 | 1742.99 | 872 | 581.67 |
| SP10 | 808 | Ac-LTF$r8AYWAQL$SAAib-NH2 | | 1687.93 | 845.36 | 1688.94 | 844.97 | 563.65 |
| SP11 | 809 | Ac-LTF$r8AYWAQL$SAA-NH2 | | 1673.92 | 838.01 | 1674.93 | 837.97 | 558.98 |
| SP12 | 810 | Ac-LTF$r8AYWA$L$S$Nle-NH2 | | 1767.04 | 884.77 | 1768.05 | 884.53 | 590.02 |
| SP13 | 811 | Ac-LTF$r8AYWA$L$S$A-NH2 | | 1724.99 | 864.23 | 1726 | 863.5 | 576 |
| SP14 | 812 | Ac-F$r8AYWEAc3cL$AANle-NH2 | | 1498.82 | 750.46 | 1499.83 | 750.42 | 500.61 |
| SP15 | 813 | Ac-F$r8AYWEAc3cL$AAL-NH2 | | 1498.82 | 750.46 | 1499.83 | 750.42 | 500.61 |
| SP16 | 814 | Ac-F$r8AYWEAc3cL$AAM-NH2 | | 1516.78 | 759.41 | 1517.79 | 759.4 | 506.6 |
| SP17 | 815 | Ac-F$r8AYWEAc3cL$AAhL-NH2 | | 1512.84 | 757.49 | 1513.85 | 757.43 | 505.29 |
| SP18 | 816 | Ac-F$r8AYWEAc3cL$AAF-NH2 | | 1532.81 | 767.48 | 1533.82 | 767.41 | 511.94 |
| SP19 | 817 | Ac-F$r8AYWEAc3cL$AAI-NH2 | | 1498.82 | 750.39 | 1499.83 | 750.42 | 500.61 |
| SP20 | 818 | Ac-F$r8AYWEAc3cL$AAChg-NH2 | | 1524.84 | 763.48 | 1525.85 | 763.43 | 509.29 |
| SP21 | 819 | Ac-F$r8AYWEAc3cL$AACha-NH2 | | 1538.85 | 770.44 | 1539.86 | 770.43 | 513.96 |
| SP22 | 820 | Ac-F$r8AYWEAc3cL$AAAib-NH2 | | 1470.79 | 736.84 | 1471.8 | 736.4 | 491.27 |
| SP23 | 821 | Ac-LTF$r8AYWAQL$AAAibV-NH2 | | 1771.01 | 885.81 | 1772.02 | 886.51 | 591.34 |
| SP24 | 822 | Ac-LTF$r8AYWAQL$AAAibV-NH2 | iso2 | 1771.01 | 886.26 | 1772.02 | 886.51 | 591.34 |
| SP25 | 823 | Ac-LTF$r8AYWAQL$SAibAA-NH2 | | 1758.97 | 879.89 | 1759.98 | 880.49 | 587.33 |
| SP26 | 824 | Ac-LTF$r8AYWAQL$SAibAA-NH2 | iso2 | 1758.97 | 880.34 | 1759.98 | 880.49 | 587.33 |
| SP27 | 825 | Ac-HLTF$r8HHWHQL$AANleNle-NH2 | | 2056.15 | 1028.86 | 2057.16 | 1029.08 | 686.39 |
| SP28 | 826 | Ac-DLTF$r8HHWHQL$RRLV-NH2 | | 2190.23 | 731.15 | 2191.24 | 1096.12 | 731.08 |
| SP29 | 827 | Ac-HHTF$r8HHWHQL$AAML-NH2 | | 2098.08 | 700.43 | 2099.09 | 1050.05 | 700.37 |
| SP30 | 828 | Ac-F$r8HHWHQL$RRDCha-NH2 | | 1917.06 | 959.96 | 1918.07 | 959.54 | 640.03 |
| SP31 | 829 | Ac-F$r8HHWHQL$HRFV-NH2 | | 1876.02 | 938.65 | 1877.03 | 939.02 | 626.35 |
| SP32 | 830 | Ac-HLTF$r8HHWHQL$AAhLA-NH2 | | 2028.12 | 677.2 | 2029.13 | 1015.07 | 677.05 |
| SP33 | 831 | Ac-DLTF$r8HHWHQL$RRChgl-NH2 | | 2230.26 | 1115.89 | 2231.27 | 1116.14 | 744.43 |
| SP34 | 832 | Ac-DLTF$r8HHWHQL$RRChgl-NH2 | iso2 | 2230.26 | 1115.96 | 2231.27 | 1116.14 | 744.43 |
| SP35 | 833 | Ac-HHTF$r8HHWHQL$AAChav-NH2 | | 2106.14 | 1053.95 | 2107.15 | 1054.08 | 703.05 |
| SP36 | 834 | Ac-F$r8HHWHQL$RRDa-NH2 | | 1834.99 | 918.3 | 1836 | 918.5 | 612.67 |
| SP37 | 835 | Ac-F$r8HHWHQL$HRAibG-NH2 | | 1771.95 | 886.77 | 1772.96 | 886.98 | 591.66 |
| SP38 | 836 | Ac-F$r8AYWAQL$HHNleL-NH2 | | 1730.97 | 866.57 | 1731.98 | 866.49 | 578 |
| SP39 | 837 | Ac-F$r8AYWSAL$HQANle-NH2 | | 1638.89 | 820.54 | 1639.9 | 820.45 | 547.3 |
| SP40 | 838 | Ac-F$r8AYWVQL$QHChgl-NH2 | | 1776.01 | 889.44 | 1777.02 | 889.01 | 593.01 |
| SP41 | 839 | Ac-F$r8AYWTAL$QQNlev-NH2 | | 1671.94 | 836.97 | 1672.95 | 836.98 | 558.32 |
| SP42 | 840 | Ac-F$r8AYWYQL$HAibAa-NH2 | | 1686.89 | 844.52 | 1687.9 | 844.45 | 563.3 |
| SP43 | 841 | Ac-LTF$r8AYWAQL$HHLa-NH2 | | 1903.05 | 952.27 | 1904.06 | 952.53 | 635.36 |
| SP44 | 842 | Ac-LTF$r8AYWAQL$HHLa-NH2 | iso2 | 1903.05 | 952.27 | 1904.06 | 952.53 | 635.36 |
| SP45 | 843 | Ac-LTF$r8AYWAQL$HQNlev-NH2 | | 1922.08 | 962.48 | 1923.09 | 962.05 | 641.7 |
| SP46 | 844 | Ac-LTF$r8AYWAQL$HQNlev-NH2 | iso2 | 1922.08 | 962.4 | 1923.09 | 962.05 | 641.7 |
| SP47 | 845 | Ac-LTF$r8AYWAQL$QQMl-NH2 | | 1945.05 | 973.95 | 1946.06 | 973.53 | 649.36 |
| SP48 | 846 | Ac-LTF$r8AYWAQL$QQMl-NH2 | iso2 | 1945.05 | 973.88 | 1946.06 | 973.53 | 649.36 |
| SP49 | 847 | Ac-LTF$r8AYWAQL$HAibhLV-NH2 | | 1893.09 | 948.31 | 1894.1 | 947.55 | 632.04 |
| SP50 | 848 | Ac-LTF$r8AYWAQL$AHFA-NH2 | | 1871.01 | 937.4 | 1872.02 | 936.51 | 624.68 |
| SP51 | 849 | Ac-HLTF$r8HHWHQL$AANlel-NH2 | | 2056.15 | 1028.79 | 2057.16 | 1029.08 | 686.39 |
| SP52 | 850 | Ac-DLTF$r8HHWHQL$RRLa-NH2 | | 2162.2 | 721.82 | 2163.21 | 1082.11 | 721.74 |
| SP53 | 851 | Ac-HHTF$r8HHWHQL$AAMv-NH2 | | 2084.07 | 1042.92 | 2085.08 | 1043.04 | 695.7 |
| SP54 | 852 | Ac-F$r8HHWHQL$RRDA-NH2 | | 1834.99 | 612.74 | 1836 | 918.5 | 612.67 |
| SP55 | 853 | Ac-F$r8HHWHQL$HRFCha-NH2 | | 1930.06 | 966.47 | 1931.07 | 966.04 | 644.36 |
| SP56 | 854 | Ac-F$r8AYWEAL$AA-NHAm | | 1443.82 | 1445.71 | 1444.83 | 722.92 | 482.28 |
| SP57 | 855 | Ac-F$r8AYWEAL$AA-NHiAm | | 1443.82 | 723.13 | 1444.83 | 722.92 | 482.28 |
| SP58 | 856 | Ac-F$r8AYWEAL$AA-NHnPr3Ph | | 1491.82 | 747.3 | 1492.83 | 746.92 | 498.28 |
| SP59 | 857 | Ac-F$r8AYWEAL$AA-NHnBu33Me | | 1457.83 | 1458.94 | 1458.84 | 729.92 | 486.95 |
| SP60 | 858 | Ac-F$r8AYWEAL$AA-NHnPr | | 1415.79 | 709.28 | 1416.8 | 708.9 | 472.94 |
| SP61 | 859 | Ac-F$r8AYWEAL$AA-NHnEt2Ch | | 1483.85 | 1485.77 | 1484.86 | 742.93 | 495.62 |
| SP62 | 860 | Ac-F$r8AYWEAL$AA-NHnEt2Cp | | 1469.83 | 1470.78 | 1470.84 | 735.92 | 490.95 |
| SP63 | 861 | Ac-F$r8AYWEAL$AA-NHHex | | 1457.83 | 730.19 | 1458.84 | 729.92 | 486.95 |
| SP64 | 862 | Ac-LTF$r8AYWAQL$AAIA-NH2 | | 1771.01 | 885.81 | 1772.02 | 886.51 | 591.34 |
| SP65 | 863 | Ac-LTF$r8AYWAQL$AAIA-NH2 | iso2 | 1771.01 | 866.8 | 1772.02 | 886.51 | 591.34 |
| SP66 | 864 | Ac-LTF$r8AYWAAL$AAMA-NH2 | | 1731.94 | 867.08 | 1732.95 | 866.98 | 578.32 |
| SP67 | 865 | Ac-LTF$r8AYWAAL$AAMA-NH2 | iso2 | 1731.94 | 867.28 | 1732.95 | 866.98 | 578.32 |
| SP68 | 866 | Ac-LTF$r8AYWAQL$AANleA-NH2 | | 1771.01 | 867.1 | 1772.02 | 886.51 | 591.34 |
| SP69 | 867 | Ac-LTF$r8AYWAQL$AANleA-NH2 | iso2 | 1771.01 | 886.89 | 1772.02 | 886.51 | 591.34 |
| SP70 | 868 | Ac-LTF$r8AYWAQL$AAIa-NH2 | | 1771.01 | 886.8 | 1772.02 | 886.51 | 591.34 |
| SP71 | 869 | Ac-LTF$r8AYWAQL$AAIa-NH2 | iso2 | 1771.01 | 887.09 | 1772.02 | 886.51 | 591.34 |
| SP72 | 870 | Ac-LTF$r8AYWAAL$AAMa-NH2 | | 1731.94 | 867.17 | 1732.95 | 866.98 | 578.32 |
| SP73 | 871 | Ac-LTF$r8AYWAAL$AAMa-NH2 | iso2 | 1731.94 | 867.37 | 1732.95 | 866.98 | 578.32 |
| SP74 | 872 | Ac-LTF$r8AYWAQL$AANlea-NH2 | | 1771.01 | 887.08 | 1772.02 | 886.51 | 591.34 |
| SP75 | 873 | Ac-LTF$r8AYWAQL$AANlea-NH2 | iso2 | 1771.01 | 887.08 | 1772.02 | 886.51 | 591.34 |
| SP76 | 874 | Ac-LTF$r8AYWAAL$AAIv-NH2 | | 1742.02 | 872.37 | 1743.03 | 872.02 | 581.68 |
| SP77 | 875 | Ac-LTF$r8AYWAAL$AAIv-NH2 | iso2 | 1742.02 | 872.74 | 1743.03 | 872.02 | 581.68 |
| SP78 | 876 | Ac-LTF$r8AYWAQL$AAMv-NH2 | | 1817 | 910.02 | 1818.01 | 909.51 | 606.67 |
| SP79 | 877 | Ac-LTF$r8AYWAAL$AANlev-NH2 | | 1742.02 | 872.37 | 1743.03 | 872.02 | 581.68 |
| SP80 | 878 | Ac-LTF$r8AYWAAL$AANlev-NH2 | iso2 | 1742.02 | 872.28 | 1743.03 | 872.02 | 581.68 |
| SP81 | 879 | Ac-LTF$r8AYWAQL$AAIl-NH2 | | 1813.05 | 907.81 | 1814.06 | 907.53 | 605.36 |
| SP82 | 880 | Ac-LTF$r8AYWAQL$AAIl-NH2 | iso2 | 1813.05 | 907.81 | 1814.06 | 907.53 | 605.36 |
| SP83 | 881 | Ac-LTF$r8AYWAAL$AAMl-NH2 | | 1773.99 | 887.37 | 1775 | 888 | 592.34 |
| SP84 | 882 | Ac-LTF$r8AYWAQL$AANlel-NH2 | | 1813.05 | 907.61 | 1814.06 | 907.53 | 605.36 |
| SP85 | 883 | Ac-LTF$r8AYWAQL$AANlel-NH2 | iso2 | 1813.05 | 907.71 | 1814.06 | 907.53 | 605.36 |
| SP86 | 884 | Ac-F$r8AYWEAL$AAMA-NH2 | | 1575.82 | 789.02 | 1576.83 | 788.92 | 526.28 |
| SP87 | 885 | Ac-F$r8AYWEAL$AANleA-NH2 | | 1557.86 | 780.14 | 1558.87 | 779.94 | 520.29 |
| SP88 | 886 | Ac-F$r8AYWEAL$AAIa-NH2 | | 1557.86 | 780.33 | 1558.87 | 779.94 | 520.29 |
| SP89 | 887 | Ac-F$r8AYWEAL$AAMa-NH2 | | 1575.82 | 789.3 | 1576.83 | 788.92 | 526.28 |
| SP90 | 888 | Ac-F$r8AYWEAL$AANlea-NH2 | | 1557.86 | 779.4 | 1558.87 | 779.94 | 520.29 |
| SP91 | 889 | Ac-F$r8AYWEAL$AAIv-NH2 | | 1585.89 | 794.29 | 1586.9 | 793.95 | 529.64 |
| SP92 | 890 | Ac-F$r8AYWEAL$AAMv-NH2 | | 1603.85 | 803.08 | 1604.86 | 802.93 | 535.62 |
| SP93 | 891 | Ac-F$r8AYWEAL$AANlev-NH2 | | 1585.89 | 793.46 | 1586.9 | 793.95 | 529.64 |
| SP94 | 892 | Ac-F$r8AYWEAL$AAIl-NH2 | | 1599.91 | 800.49 | 1600.92 | 800.96 | 534.31 |
| SP95 | 893 | Ac-F$r8AYWEAL$AAMl-NH2 | | 1617.86 | 809.44 | 1618.87 | 809.94 | 540.29 |
| SP96 | 894 | Ac-F$r8AYWEAL$AANlel-NH2 | | 1599.91 | 801.7 | 1600.92 | 800.96 | 534.31 |
| SP97 | 895 | Ac-F$r8AYWEAL$AANlel-NH2 | iso2 | 1599.91 | 801.42 | 1600.92 | 800.96 | 534.31 |
| SP98 | 896 | Ac-LTF$r8AY6clWAQL$SAA-NH2 | | 1707.88 | 855.72 | 1708.89 | 854.95 | 570.3 |
| SP99 | 897 | Ac-LTF$r8AY6clWAQL$SAA-NH2 | iso2 | 1707.88 | 855.35 | 1708.89 | 854.95 | 570.3 |
| SP100 | 898 | Ac-WTF$r8FYWSQL$AVAa-NH2 | | 1922.01 | 962.21 | 1923.02 | 962.01 | 641.68 |
| SP101 | 899 | Ac-WTF$r8FYWSQL$AVAa-NH2 | iso2 | 1922.01 | 962.49 | 1923.02 | 962.01 | 641.68 |
| SP102 | 900 | Ac-WTF$r8VYWSQL$AVA-NH2 | | 1802.98 | 902.72 | 1803.99 | 902.5 | 602 |
| SP103 | 901 | Ac-WTF$r8VYWSQL$AVA-NH2 | iso2 | 1802.98 | 903 | 1803.99 | 902.5 | 602 |
| SP104 | 902 | Ac-WTF$r8FYWSQL$SAAa-NH2 | | 1909.98 | 956.47 | 1910.99 | 956 | 637.67 |
| SP105 | 903 | Ac-WTF$r8FYWSQL$SAAa-NH2 | iso2 | 1909.98 | 956.47 | 1910.99 | 956 | 637.67 |
| SP106 | 904 | Ac-WTF$r8VYWSQL$AVAaa-NH2 | | 1945.05 | 974.15 | 1946.06 | 973.53 | 649.36 |
| SP107 | 905 | Ac-WTF$r8VYWSQL$AVAaa-NH2 | iso2 | 1945.05 | 973.78 | 1946.06 | 973.53 | 649.36 |
| SP108 | 906 | Ac-LTF$r8AYWAQL$AVG-NH2 | | 1671.94 | 837.52 | 1672.95 | 836.98 | 558.32 |
| SP109 | 907 | Ac-LTF$r8AYWAQL$AVG-NH2 | iso2 | 1671.94 | 837.21 | 1672.95 | 836.98 | 558.32 |
| SP110 | 908 | Ac-LTF$r8AYWAQL$AVQ-NH2 | | 1742.98 | 872.74 | 1743.99 | 872.5 | 582 |
| SP111 | 909 | Ac-LTF$r8AYWAQL$AVQ-NH2 | iso2 | 1742.98 | 872.74 | 1743.99 | 872.5 | 582 |
| SP112 | 910 | Ac-LTF$r8AYWAQL$SAa-NH2 | | 1673.92 | 838.23 | 1674.93 | 837.97 | 558.98 |
| SP113 | 911 | Ac-LTF$r8AYWAQL$SAa-NH2 | iso2 | 1673.92 | 838.32 | 1674.93 | 837.97 | 558.98 |
| SP114 | 912 | Ac-LTF$r8AYWAQhL$SAA-NH2 | | 1687.93 | 844.37 | 1688.94 | 844.97 | 563.65 |
| SP115 | 913 | Ac-LTF$r8AYWAQhL$SAA-NH2 | iso2 | 1687.93 | 844.81 | 1688.94 | 844.97 | 563.65 |
| SP116 | 914 | Ac-LTF$r8AYWEQLStSA$-NH2 | | 1826 | 905.27 | 1827.01 | 914.01 | 609.67 |
| SP117 | 915 | Ac-LTF$r8AYWAQL$SLA-NH2 | | 1715.97 | 858.48 | 1716.98 | 858.99 | 573 |
| SP118 | 916 | Ac-LTF$r8AYWAQL$SLA-NH2 | iso2 | 1715.97 | 858.87 | 1716.98 | 858.99 | 573 |
| SP119 | 917 | Ac-LTF$r8AYWAQL$SWA-NH2 | | 1788.96 | 895.21 | 1789.97 | 895.49 | 597.33 |
| SP120 | 918 | Ac-LTF$r8AYWAQL$SWA-NH2 | iso2 | 1788.96 | 895.28 | 1789.97 | 895.49 | 597.33 |
| SP121 | 919 | Ac-LTF$r8AYWAQL$SVS-NH2 | | 1717.94 | 859.84 | 1718.95 | 859.98 | 573.65 |
| SP122 | 920 | Ac-LTF$r8AYWAQL$SAS-NH2 | | 1689.91 | 845.85 | 1690.92 | 845.96 | 564.31 |
| SP123 | 921 | Ac-LTF$r8AYWAQL$SVG-NH2 | | 1687.93 | 844.81 | 1688.94 | 844.97 | 563.65 |
| SP124 | 922 | Ac-ETF$r8VYWAQL$SAa-NH2 | | 1717.91 | 859.76 | 1718.92 | 859.96 | 573.64 |
| SP125 | 923 | Ac-ETF$r8VYWAQL$SAA-NH2 | | 1717.91 | 859.84 | 1718.92 | 859.96 | 573.64 |
| SP126 | 924 | Ac-ETF$r8VYWAQL$SVA-NH2 | | 1745.94 | 873.82 | 1746.95 | 873.98 | 582.99 |
| SP127 | 925 | Ac-ETF$r8VYWAQL$SLA-NH2 | | 1759.96 | 880.85 | 1760.97 | 880.99 | 587.66 |
| SP128 | 926 | Ac-ETF$r8VYWAQL$SWA-NH2 | | 1832.95 | 917.34 | 1833.96 | 917.48 | 611.99 |
| SP129 | 927 | Ac-ETF$r8KYWAQL$SWA-NH2 | | 1861.98 | 931.92 | 1862.99 | 932 | 621.67 |
| SP130 | 928 | Ac-ETF$r8VYWAQL$SVS-NH2 | | 1761.93 | 881.89 | 1762.94 | 881.97 | 588.32 |
| SP131 | 929 | Ac-ETF$r8VYWAQL$SAS-NH2 | | 1733.9 | 867.83 | 1734.91 | 867.96 | 578.97 |
| SP132 | 930 | Ac-ETF$r8VYWAQL$SVG-NH2 | | 1731.92 | 866.87 | 1732.93 | 866.97 | 578.31 |
| SP133 | 931 | Ac-LTF$r8VYWAQL$SSa-NH2 | | 1717.94 | 859.47 | 1718.95 | 859.98 | 573.65 |
| SP134 | 932 | Ac-ETF$r8VYWAQL$SSa-NH2 | | 1733.9 | 867.83 | 1734.91 | 867.96 | 578.97 |
| SP135 | 933 | Ac-LTF$r8VYWAQL$SNa-NH2 | | 1744.96 | 873.38 | 1745.97 | 873.49 | 582.66 |
| SP136 | 934 | Ac-ETF$r8VYWAQL$SNa-NH2 | | 1760.91 | 881.3 | 1761.92 | 881.46 | 587.98 |
| SP137 | 935 | Ac-LTF$r8VYWAQL$SAa-NH2 | | 1701.95 | 851.84 | 1702.96 | 851.98 | 568.32 |
| SP138 | 936 | Ac-LTF$r8VYWAQL$SVA-NH2 | | 1729.98 | 865.53 | 1730.99 | 866 | 577.67 |
| SP139 | 937 | Ac-LTF$r8VYWAQL$SVA-NH2 | iso2 | 1729.98 | 865.9 | 1730.99 | 866 | 577.67 |
| SP140 | 938 | Ac-LTF$r8VYWAQL$SWA-NH2 | | 1816.99 | 909.42 | 1818 | 909.5 | 606.67 |
| SP141 | 939 | Ac-LTF$r8VYWAQL$SVS-NH2 | | 1745.98 | 873.9 | 1746.99 | 874 | 583 |
| SP142 | 940 | Ac-LTF$r8VYWAQL$SVS-NH2 | iso2 | 1745.98 | 873.9 | 1746.99 | 874 | 583 |
| SP143 | 941 | Ac-LTF$r8VYWAQL$SAS-NH2 | | 1717.94 | 859.84 | 1718.95 | 859.98 | 573.65 |
| SP144 | 942 | Ac-LTF$r8VYWAQL$SAS-NH2 | iso2 | 1717.94 | 859.91 | 1718.95 | 859.98 | 573.65 |
| SP145 | 943 | Ac-LTF$r8VYWAQL$SVG-NH2 | | 1715.97 | 858.87 | 1716.98 | 858.99 | 573 |
| SP146 | 944 | Ac-LTF$r8VYWAQL$SVG-NH2 | iso2 | 1715.97 | 858.87 | 1716.98 | 858.99 | 573 |
| SP147 | 945 | Ac-LTF$r8EYWAQCha$SAA-NH2 | | 1771.96 | 886.85 | 1772.97 | 886.99 | 591.66 |
| SP148 | 946 | Ac-LTF$r8EYWAQCha$SAA-NH2 | iso2 | 1771.96 | 886.85 | 1772.97 | 886.99 | 591.66 |
| SP149 | 947 | Ac-LTF$r8EYWAQCpg$SAA-NH2 | | 1743.92 | 872.86 | 1744.93 | 872.97 | 582.31 |
| SP150 | 948 | Ac-LTF$r8EYWAQCpg$SAA-NH2 | iso2 | 1743.92 | 872.86 | 1744.93 | 872.97 | 582.31 |
| SP151 | 949 | Ac-LTF$r8EYWAQF$SAA-NH2 | | 1765.91 | 883.44 | 1766.92 | 883.96 | 589.64 |
| SP152 | 950 | Ac-LTF$r8EYWAQF$SAA-NH2 | iso2 | 1765.91 | 883.89 | 1766.92 | 883.96 | 589.64 |
| SP153 | 951 | Ac-LTF$r8EYWAQCba$SAA-NH2 | | 1743.92 | 872.42 | 1744.93 | 872.97 | 582.31 |
| SP154 | 952 | Ac-LTF$r8EYWAQCba$SAA-NH2 | iso2 | 1743.92 | 873.39 | 1744.93 | 872.97 | 582.31 |
| SP155 | 953 | Ac-LTF3Cl$r8EYWAQL$SAA-NH2 | | 1765.89 | 883.89 | 1766.9 | 883.95 | 589.64 |
| SP156 | 954 | Ac-LTF3Cl$r8EYWAQL$SAA-NH2 | iso2 | 1765.89 | 883.96 | 1766.9 | 883.95 | 589.64 |
| SP157 | 955 | Ac-LTF34F2$r8EYWAQL$SAA-NH2 | | 1767.91 | 884.48 | 1768.92 | 884.96 | 590.31 |
| SP158 | 956 | Ac-LTF34F2$r8EYWAQL$SAA-NH2 | iso2 | 1767.91 | 884.48 | 1768.92 | 884.96 | 590.31 |
| SP159 | 957 | Ac-LTF34F2$r8EYWAQhL$SAA-NH2 | | 1781.92 | 891.44 | 1782.93 | 891.97 | 594.98 |
| SP160 | 958 | Ac-LTF34F2$r8EYWAQhL$SAA-NH2 | iso2 | 1781.92 | 891.88 | 1782.93 | 891.97 | 594.98 |
| SP161 | 959 | Ac-ETF$r8EYWAQL$SAA-NH2 | | 1747.88 | 874.34 | 1748.89 | 874.95 | 583.63 |
| SP162 | 960 | Ac-LTF$r8AYWVQL$SAA-NH2 | | 1701.95 | 851.4 | 1702.96 | 851.98 | 568.32 |
| SP163 | 961 | Ac-LTF$r8AHWAQL$SAA-NH2 | | 1647.91 | 824.83 | 1648.92 | 824.96 | 550.31 |
| SP164 | 962 | Ac-LTF$r8AEWAQL$SAA-NH2 | | 1639.9 | 820.39 | 1640.91 | 820.96 | 547.64 |
| SP165 | 963 | Ac-LTF$r8ASWAQL$SAA-NH2 | | 1597.89 | 799.38 | 1598.9 | 799.95 | 533.64 |
| SP166 | 964 | Ac-LTF$r8AEWAQL$SAA-NH2 | iso2 | 1639.9 | 820.39 | 1640.91 | 820.96 | 547.64 |
| SP167 | 965 | Ac-LTF$r8ASWAQL$SAA-NH2 | iso2 | 1597.89 | 800.31 | 1598.9 | 799.95 | 533.64 |
| SP168 | 966 | Ac-LTF$r8AF4coohWAQL$SAA-NH2 | | 1701.91 | 851.4 | 1702.92 | 851.96 | 568.31 |
| SP169 | 967 | Ac-LTF$r8AF4coohWAQL$SAA-NH2 | iso2 | 1701.91 | 851.4 | 1702.92 | 851.96 | 568.31 |
| SP170 | 968 | Ac-LTF$r8AHWAQL$AAIa-NH2 | | 1745 | 874.13 | 1746.01 | 873.51 | 582.67 |
| SP171 | 969 | Ac-ITF$r8FYWAQL$AAIa-NH2 | | 1847.04 | 923.92 | 1848.05 | 924.53 | 616.69 |
| SP172 | 970 | Ac-ITF$r8EHWAQL$AAIa-NH2 | | 1803.01 | 903.17 | 1804.02 | 902.51 | 602.01 |
| SP173 | 971 | Ac-ITF$r8EHWAQL$AAIa-NH2 | iso2 | 1803.01 | 903.17 | 1804.02 | 902.51 | 602.01 |
| SP174 | 972 | Ac-ETF$r8EHWAQL$AAIa-NH2 | | 1818.97 | 910.76 | 1819.98 | 910.49 | 607.33 |
| SP175 | 973 | Ac-ETF$r8EHWAQL$AAIa-NH2 | iso2 | 1818.97 | 910.85 | 1819.98 | 910.49 | 607.33 |
| SP176 | 974 | Ac-LTF$r8AHWVQL$AAIa-NH2 | | 1773.03 | 888.09 | 1774.04 | 887.52 | 592.02 |
| SP177 | 975 | Ac-ITF$r8FYWVQL$AAIa-NH2 | | 1875.07 | 939.16 | 1876.08 | 938.54 | 626.03 |
| SP178 | 976 | Ac-ITF$r8EYWVQL$AAIa-NH2 | | 1857.04 | 929.83 | 1858.05 | 929.53 | 620.02 |
| SP179 | 977 | Ac-ITF$r8EHWVQL$AAIa-NH2 | | 1831.04 | 916.86 | 1832.05 | 916.53 | 611.35 |
| SP180 | 978 | Ac-LTF$r8AEWAQL$AAIa-NH2 | | 1736.99 | 869.87 | 1738 | 869.5 | 580 |
| SP181 | 979 | Ac-LTF$r8AF4coohWAQL$AAIa-NH2 | | 1799 | 900.17 | 1800.01 | 900.51 | 600.67 |
| SP182 | 980 | Ac-LTF$r8AF4coohWAQL$AAIa-NH2 | iso2 | 1799 | 900.24 | 1800.01 | 900.51 | 600.67 |
| SP183 | 981 | Ac-LTF$r8AHWAQL$AHFA-NH2 | | 1845.01 | 923.89 | 1846.02 | 923.51 | 616.01 |
| SP184 | 982 | Ac-ITF$r8FYWAQL$AHFA-NH2 | | 1947.05 | 975.05 | 1948.06 | 974.53 | 650.02 |
| SP185 | 983 | Ac-ITF$r8FYWAQL$AHFA-NH2 | iso2 | 1947.05 | 976.07 | 1948.06 | 974.53 | 650.02 |
| SP186 | 984 | Ac-ITF$r8FHWAQL$AEFA-NH2 | | 1913.02 | 958.12 | 1914.03 | 957.52 | 638.68 |
| SP187 | 985 | Ac-ITF$r8FHWAQL$AEFA-NH2 | iso2 | 1913.02 | 957.86 | 1914.03 | 957.52 | 638.68 |
| SP188 | 986 | Ac-ITF$r8EHWAQL$AHFA-NH2 | | 1903.01 | 952.94 | 1904.02 | 952.51 | 635.34 |
| SP189 | 987 | Ac-ITF$r8EHWAQL$AHFA-NH2 | iso2 | 1903.01 | 953.87 | 1904.02 | 952.51 | 635.34 |
| SP190 | 988 | Ac-LTF$r8AHWVQL$AHFA-NH2 | | 1873.04 | 937.86 | 1874.05 | 937.53 | 625.35 |
| SP191 | 989 | Ac-ITF$r8FYWVQL$AHFA-NH2 | | 1975.08 | 988.83 | 1976.09 | 988.55 | 659.37 |
| SP192 | 990 | Ac-ITF$r8EYWVQL$AHFA-NH2 | | 1957.05 | 979.35 | 1958.06 | 979.53 | 653.36 |
| SP193 | 991 | Ac-ITF$r8EHWVQL$AHFA-NH2 | | 1931.05 | 967 | 1932.06 | 966.53 | 644.69 |
| SP194 | 992 | Ac-ITF$r8EHWVQL$AHFA-NH2 | iso2 | 1931.05 | 967.93 | 1932.06 | 966.53 | 644.69 |
| SP195 | 993 | Ac-ETF$r8EYWAAL$SAA-NH2 | | 1690.86 | 845.85 | 1691.87 | 846.44 | 564.63 |
| SP196 | 994 | Ac-LTF$r8AYWVAL$SAA-NH2 | | 1644.93 | 824.08 | 1645.94 | 823.47 | 549.32 |
| SP197 | 995 | Ac-LTF$r8AHWAAL$SAA-NH2 | | 1590.89 | 796.88 | 1591.9 | 796.45 | 531.3 |
| SP198 | 996 | Ac-LTF$r8AEWAAL$SAA-NH2 | | 1582.88 | 791.9 | 1583.89 | 792.45 | 528.63 |
| SP199 | 997 | Ac-LTF$r8AEWAAL$SAA-NH2 | iso2 | 1582.88 | 791.9 | 1583.89 | 792.45 | 528.63 |
| SP200 | 998 | Ac-LTF$r8ASWAAL$SAA-NH2 | | 1540.87 | 770.74 | 1541.88 | 771.44 | 514.63 |
| SP201 | 999 | Ac-LTF$r8ASWAAL$SAA-NH2 | iso2 | 1540.87 | 770.88 | 1541.88 | 771.44 | 514.63 |
| SP202 | 1000 | Ac-LTF$r8AYWAAL$AAIa-NH2 | | 1713.99 | 857.39 | 1715 | 858 | 572.34 |
| SP203 | 1001 | Ac-LTF$r8AYWAAL$AAIa-NH2 | iso2 | 1713.99 | 857.84 | 1715 | 858 | 572.34 |
| SP204 | 1002 | Ac-LTF$r8AYWAAL$AHFA-NH2 | | 1813.99 | 907.86 | 1815 | 908 | 605.67 |
| SP205 | 1003 | Ac-LTF$r8EHWAQL$AHIa-NH2 | | 1869.03 | 936.1 | 1870.04 | 935.52 | 624.02 |
| SP206 | 1004 | Ac-LTF$r8EHWAQL$AHIa-NH2 | iso2 | 1869.03 | 937.03 | 1870.04 | 935.52 | 624.02 |
| SP207 | 1005 | Ac-LTF$r8AHWAQL$AHIa-NH2 | | 1811.03 | 906.87 | 1812.04 | 906.52 | 604.68 |
| SP208 | 1006 | Ac-LTF$r8EYWAQL$AHIa-NH2 | | 1895.04 | 949.15 | 1896.05 | 948.53 | 632.69 |
| SP209 | 1007 | Ac-LTF$r8AYWAQL$AAFa-NH2 | | 1804.99 | 903.2 | 1806 | 903.5 | 602.67 |
| SP210 | 1008 | Ac-LTF$r8AYWAQL$AAFa-NH2 | iso2 | 1804.99 | 903.28 | 1806 | 903.5 | 602.67 |
| SP211 | 1009 | Ac-LTF$r8AYWAQL$AAWa-NH2 | | 1844 | 922.81 | 1845.01 | 923.01 | 615.67 |
| SP212 | 1010 | Ac-LTF$r8AYWAQL$AAVa-NH2 | | 1756.99 | 878.86 | 1758 | 879.5 | 586.67 |
| SP213 | 1011 | Ac-LTF$r8AYWAQL$AAVa-NH2 | iso2 | 1756.99 | 879.3 | 1758 | 879.5 | 586.67 |
| SP214 | 1012 | Ac-LTF$r8AYWAQL$AALa-NH2 | | 1771.01 | 886.26 | 1772.02 | 886.51 | 591.34 |
| SP215 | 1013 | Ac-LTF$r8AYWAQL$AALa-NH2 | iso2 | 1771.01 | 886.33 | 1772.02 | 886.51 | 591.34 |
| SP216 | 1014 | Ac-LTF$r8EYWAQL$AAIa-NH2 | | 1829.01 | 914.89 | 1830.02 | 915.51 | 610.68 |
| SP217 | 1015 | Ac-LTF$r8EYWAQL$AAIa-NH2 | iso2 | 1829.01 | 915.34 | 1830.02 | 915.51 | 610.68 |
| SP218 | 1016 | Ac-LTF$r8EYWAQL$AAFa-NH2 | | 1863 | 932.87 | 1864.01 | 932.51 | 622.01 |
| SP219 | 1017 | Ac-LTF$r8EYWAQL$AAFa-NH2 | iso2 | 1863 | 932.87 | 1864.01 | 932.51 | 622.01 |
| SP220 | 1018 | Ac-LTF$r8EYWAQL$AAVa-NH2 | | 1815 | 908.23 | 1816.01 | 908.51 | 606.01 |
| SP221 | 1019 | Ac-LTF$r8EYWAQL$AAVa-NH2 | iso2 | 1815 | 908.31 | 1816.01 | 908.51 | 606.01 |
| SP222 | 1020 | Ac-LTF$r8EHWAQL$AAIa-NH2 | | 1803.01 | 903.17 | 1804.02 | 902.51 | 602.01 |
| SP223 | 1021 | Ac-LTF$r8EHWAQL$AAIa-NH2 | iso2 | 1803.01 | 902.8 | 1804.02 | 902.51 | 602.01 |
| SP224 | 1022 | Ac-LTF$r8EHWAQL$AAWa-NH2 | | 1876 | 939.34 | 1877.01 | 939.01 | 626.34 |
| SP225 | 1023 | Ac-LTF$r8EHWAQL$AAWa-NH2 | iso2 | 1876 | 939.62 | 1877.01 | 939.01 | 626.34 |
| SP226 | 1024 | Ac-LTF$r8EHWAQL$AALa-NH2 | | 1803.01 | 902.8 | 1804.02 | 902.51 | 602.01 |
| SP227 | 1025 | Ac-LTF$r8EHWAQL$AALa-NH2 | iso2 | 1803.01 | 902.9 | 1804.02 | 902.51 | 602.01 |
| SP228 | 1026 | Ac-ETF$r8EHWVQL$AALa-NH2 | | 1847 | 924.82 | 1848.01 | 924.51 | 616.67 |
| SP229 | 1027 | Ac-LTF$r8AYWAQL$AAAa-NH2 | | 1728.96 | 865.89 | 1729.97 | 865.49 | 577.33 |
| SP230 | 1028 | Ac-LTF$r8AYWAQL$AAAa-NH2 | iso2 | 1728.96 | 865.89 | 1729.97 | 865.49 | 577.33 |
| SP231 | 1029 | Ac-LTF$r8AYWAQL$AAAibA-NH2 | | 1742.98 | 872.83 | 1743.99 | 872.5 | 582 |
| SP232 | 1030 | Ac-LTF$r8AYWAQL$AAAibA-NH2 | iso2 | 1742.98 | 872.92 | 1743.99 | 872.5 | 582 |
| SP233 | 1031 | Ac-LTF$r8AYWAQL$AAAAa-NH2 | | 1800 | 901.42 | 1801.01 | 901.01 | 601.01 |
| SP234 | 1032 | Ac-LTF$r5AYWAQL$s8AAIa-NH2 | | 1771.01 | 887.17 | 1772.02 | 886.51 | 591.34 |
| SP235 | 1033 | Ac-LTF$r5AYWAQL$s8SAA-NH2 | | 1673.92 | 838.33 | 1674.93 | 837.97 | 558.98 |
| SP236 | 1034 | Ac-LTF$r8AYWAQCba$AANleA-NH2 | | 1783.01 | 892.64 | 1784.02 | 892.51 | 595.34 |
| SP237 | 1035 | Ac-ETF$r8AYWAQCba$AANleA-NH2 | | 1798.97 | 900.59 | 1799.98 | 900.49 | 600.66 |
| SP238 | 1036 | Ac-LTF$r8EYWAQCba$AANleA-NH2 | | 1841.01 | 922.05 | 1842.02 | 921.51 | 614.68 |
| SP239 | 1037 | Ac-LTF$r8AYWAQCba$AWNleA-NH2 | | 1898.05 | 950.46 | 1899.06 | 950.03 | 633.69 |
| SP240 | 1038 | Ac-ETF$r8AYWAQCba$AWNleA-NH2 | | 1914.01 | 958.11 | 1915.02 | 958.01 | 639.01 |
| SP241 | 1039 | Ac-LTF$r8EYWAQCba$AWNleA-NH2 | | 1956.06 | 950.62 | 1957.07 | 979.04 | 653.03 |
| SP242 | 1040 | Ac-LTF$r8EYWAQCba$SAFA-NH2 | | 1890.99 | 946.55 | 1892 | 946.5 | 631.34 |
| SP243 | 1041 | Ac-LTF34F2$r8EYWAQCba$SANleA-NH2 | | 1892.99 | 947.57 | 1894 | 947.5 | 632 |
| SP244 | 1042 | Ac-LTF$r8EF4coohWAQCba$SANleA-NH2 | | 1885 | 943.59 | 1886.01 | 943.51 | 629.34 |
| SP245 | 1043 | Ac-LTF$r8EYWSQCba$SANleA-NH2 | | 1873 | 937.58 | 1874.01 | 937.51 | 625.34 |
| SP246 | 1044 | Ac-LTF$r8EYWWQCba$SANleA-NH2 | | 1972.05 | 987.61 | 1973.06 | 987.03 | 658.36 |
| SP247 | 1045 | Ac-LTF$r8EYWAQCba$AAIa-NH2 | | 1841.01 | 922.05 | 1842.02 | 921.51 | 614.68 |
| SP248 | 1046 | Ac-LTF34F2$r8EYWAQCba$AAIa-NH2 | | 1876.99 | 939.99 | 1878 | 939.5 | 626.67 |
| SP249 | 1047 | Ac-LTF$r8EF4coohWAQCba$AAIa-NH2 | | 1869.01 | 935.64 | 1870.02 | 935.51 | 624.01 |
| SP250 | 1048 | Pam-ETF$r8EYWAQCba$SAA-NH2 | | 1956.1 | 979.57 | 1957.11 | 979.06 | 653.04 |
| SP251 | 1049 | Ac-LThF$r8EFWAQCba$SAA-NH2 | | 1741.94 | 872.11 | 1742.95 | 871.98 | 581.65 |
| SP252 | 1050 | Ac-LTA$r8EYWAQCba$SAA-NH2 | | 1667.89 | 835.4 | 1668.9 | 834.95 | 556.97 |
| SP253 | 1051 | Ac-LTF$r8EYAAQCba$SAA-NH2 | | 1628.88 | 815.61 | 1629.89 | 815.45 | 543.97 |
| SP254 | 1052 | Ac-LTF$r8EY2NalAQCba$SAA-NH2 | | 1754.93 | 879.04 | 1755.94 | 878.47 | 585.98 |
| SP255 | 1053 | Ac-LTF$r8AYWAQCba$SAA-NH2 | | 1685.92 | 844.71 | 1686.93 | 843.97 | 562.98 |
| SP256 | 1054 | Ac-LTF$r8EYWAQCba$SAF-NH2 | | 1819.96 | 911.41 | 1820.97 | 910.99 | 607.66 |
| SP257 | 1055 | Ac-LTF$r8EYWAQCba$SAFa-NH2 | | 1890.99 | 947.41 | 1892 | 946.5 | 631.34 |
| SP258 | 1056 | Ac-LTF$r8AYWAQCba$SAF-NH2 | | 1761.95 | 882.73 | 1762.96 | 881.98 | 588.32 |
| SP259 | 1057 | Ac-LTF34F2$r8AYWAQCba$SAF-NH2 | | 1797.93 | 900.87 | 1798.94 | 899.97 | 600.32 |
| SP260 | 1058 | Ac-LTF$r8AF4coohWAQCba$SAF-NH2 | | 1789.94 | 896.43 | 1790.95 | 895.98 | 597.65 |
| SP261 | 1059 | Ac-LTF$r8EY6clWAQCba$SAF-NH2 | | 1853.92 | 929.27 | 1854.93 | 927.97 | 618.98 |
| SP262 | 1060 | Ac-LTF$r8AYWSQCba$SAF-NH2 | | 1777.94 | 890.87 | 1778.95 | 889.98 | 593.65 |
| SP263 | 1061 | Ac-LTF$r8AYWWQCba$SAF-NH2 | | 1876.99 | 939.91 | 1878 | 939.5 | 626.67 |
| SP264 | 1062 | Ac-LTF$r8AYWAQCba$AAIa-NH2 | | 1783.01 | 893.19 | 1784.02 | 892.51 | 595.34 |
| SP265 | 1063 | Ac-LTF34F2$r8AYWAQCba$AAIa-NH2 | | 1818.99 | 911.23 | 1820 | 910.5 | 607.34 |
| SP266 | 1064 | Ac-LTF$r8AY6clWAQCba$AAIa-NH2 | | 1816.97 | 909.84 | 1817.98 | 909.49 | 606.66 |
| SP267 | 1065 | Ac-LTF$r8AF4coohWAQCba$AAIa-NH2 | | 1811 | 906.88 | 1812.01 | 906.51 | 604.67 |
| SP268 | 1066 | Ac-LTF$r8EYWAQCba$AAFa-NH2 | | 1875 | 938.6 | 1876.01 | 938.51 | 626.01 |
| SP269 | 1067 | Ac-LTF$r8EYWAQCba$AAFa-NH2 | iso2 | 1875 | 938.6 | 1876.01 | 938.51 | 626.01 |
| SP270 | 1068 | Ac-ETF$r8AYWAQCba$AWNlea-NH2 | | 1914.01 | 958.42 | 1915.02 | 958.01 | 639.01 |
| SP271 | 1069 | Ac-LTF$r8EYWAQCba$AWNlea-NH2 | | 1956.06 | 979.42 | 1957.07 | 979.04 | 653.03 |
| SP272 | 1070 | Ac-ETF$r8EYWAQCba$AWNlea-NH2 | | 1972.01 | 987.06 | 1973.02 | 987.01 | 658.34 |
| SP273 | 1071 | Ac-ETF$r8EYWAQCba$AWNlea-NH2 | iso2 | 1972.01 | 987.06 | 1973.02 | 987.01 | 658.34 |
| SP274 | 1072 | Ac-LTF$r8AYWAQCba$SAFa-NH2 | | 1832.99 | 917.89 | 1834 | 917.5 | 612 |
| SP275 | 1073 | Ac-LTF$r8AYWAQCba$SAFa-NH2 | iso2 | 1832.99 | 918.07 | 1834 | 917.5 | 612 |
| SP276 | 1074 | Ac-ETF$r8AYWAQL$AWNlea-NH2 | | 1902.01 | 952.22 | 1903.02 | 952.01 | 635.01 |
| SP277 | 1075 | Ac-LTF$r8EYWAQL$AWNlea-NH2 | | 1944.06 | 973.5 | 1945.07 | 973.04 | 649.03 |
| SP278 | 1076 | Ac-ETF$r8EYWAQL$AWNlea-NH2 | | 1960.01 | 981.46 | 1961.02 | 981.01 | 654.34 |
| SP279 | 1077 | Dmaac-LTF$r8EYWAQhL$SAA-NH2 | | 1788.98 | 896.06 | 1789.99 | 895.5 | 597.33 |
| SP280 | 1078 | Hexac-LTF$r8EYWAQhL$SAA-NH2 | | 1802 | 902.9 | 1803.01 | 902.01 | 601.67 |
| SP281 | 1079 | Napac-LTF$r8EYWAQhL$SAA-NH2 | | 1871.99 | 937.58 | 1873 | 937 | 625 |
| SP282 | 1080 | Decac-LTF$r8EYWAQhL$SAA-NH2 | | 1858.06 | 930.55 | 1859.07 | 930.04 | 620.36 |
| SP283 | 1081 | Admac-LTF$r8EYWAQhL$SAA-NH2 | | 1866.03 | 934.07 | 1867.04 | 934.02 | 623.02 |
| SP284 | 1082 | Tmac-LTF$r8EYWAQhL$SAA-NH2 | | 1787.99 | 895.41 | 1789 | 895 | 597 |
| SP285 | 1083 | Pam-LTF$r8EYWAQhL$SAA-NH2 | | 1942.16 | 972.08 | 1943.17 | 972.09 | 648.39 |
| SP286 | 1084 | Ac-LTF$r8AYWAQCba$AANleA-NH2 | iso2 | 1783.01 | 892.64 | 1784.02 | 892.51 | 595.34 |
| SP287 | 1085 | Ac-LTF34F2$r8EYWAQCba$AAIa-NH2 | iso2 | 1876.99 | 939.62 | 1878 | 939.5 | 626.67 |
| SP288 | 1086 | Ac-LTF34F2$r8EYWAQCba$SAA-NH2 | | 1779.91 | 892.07 | 1780.92 | 890.96 | 594.31 |
| SP289 | 1087 | Ac-LTF34F2$r8EYWAQCba$SAA-NH2 | iso2 | 1779.91 | 891.61 | 1780.92 | 890.96 | 594.31 |
| SP290 | 1088 | Ac-LTF$r8EF4coohWAQCba$SAA-NH2 | | 1771.92 | 887.54 | 1772.93 | 886.97 | 591.65 |
| SP291 | 1089 | Ac-LTF$r8EF4coohWAQCba$SAA-NH2 | iso2 | 1771.92 | 887.63 | 1772.93 | 886.97 | 591.65 |
| SP292 | 1090 | Ac-LTF$r8EYWSQCba$SAA-NH2 | | 1759.92 | 881.9 | 1760.93 | 880.97 | 587.65 |
| SP293 | 1091 | Ac-LTF$r8EYWSQCba$SAA-NH2 | iso2 | 1759.92 | 881.9 | 1760.93 | 880.97 | 587.65 |
| SP294 | 1092 | Ac-LTF$r8EYWAQhL$SAA-NH2 | | 1745.94 | 875.05 | 1746.95 | 873.98 | 582.99 |
| SP295 | 1093 | Ac-LTF$r8AYWAQhL$SAF-NH2 | | 1763.97 | 884.02 | 1764.98 | 882.99 | 589 |
| SP296 | 1094 | Ac-LTF$r8AYWAQhL$SAF-NH2 | iso2 | 1763.97 | 883.56 | 1764.98 | 882.99 | 589 |
| SP297 | 1095 | Ac-LTF34F2$r8AYWAQhL$SAA-NH2 | | 1723.92 | 863.67 | 1724.93 | 862.97 | 575.65 |
| SP298 | 1096 | Ac-LTF34F2$r8AYWAQhL$SAA-NH2 | iso2 | 1723.92 | 864.04 | 1724.93 | 862.97 | 575.65 |
| SP299 | 1097 | Ac-LTF$r8AF4coohWAQhL$SAA-NH2 | | 1715.93 | 859.44 | 1716.94 | 858.97 | 572.98 |
| SP300 | 1098 | Ac-LTF$r8AF4coohWAQhL$SAA-NH2 | iso2 | 1715.93 | 859.6 | 1716.94 | 858.97 | 572.98 |
| SP301 | 1099 | Ac-LTF$r8AYWSQhL$SAA-NH2 | | 1703.93 | 853.96 | 1704.94 | 852.97 | 568.98 |
| SP302 | 1100 | Ac-LTF$r8AYWSQhL$SAA-NH2 | iso2 | 1703.93 | 853.59 | 1704.94 | 852.97 | 568.98 |
| SP303 | 1101 | Ac-LTF$r8EYWAQL$AANleA-NH2 | | 1829.01 | 915.45 | 1830.02 | 915.51 | 610.68 |
| SP304 | 1102 | Ac-LTF34F2$r8AYWAQL$AANleA-NH2 | | 1806.99 | 904.58 | 1808 | 904.5 | 603.34 |
| SP305 | 1103 | Ac-LTF$r8AF4coohWAQL$AANleA-NH2 | | 1799 | 901.6 | 1800.01 | 900.51 | 600.67 |
| SP306 | 1104 | Ac-LTF$r8AYWSQL$AANleA-NH2 | | 1787 | 894.75 | 1788.01 | 894.51 | 596.67 |
| SP307 | 1105 | Ac-LTF34F2$r8AYWAQhL$AANleA-NH2 | | 1821 | 911.79 | 1822.01 | 911.51 | 608.01 |
| SP308 | 1106 | Ac-LTF34F2$r8AYWAQhL$AANleA-NH2 | iso2 | 1821 | 912.61 | 1822.01 | 911.51 | 608.01 |
| SP309 | 1107 | Ac-LTF$r8AF4coohWAQhL$AANleA-NH2 | | 1813.02 | 907.95 | 1814.03 | 907.52 | 605.35 |
| SP310 | 1108 | Ac-LTF$r8AF4coohWAQhL$AANleA-NH2 | iso2 | 1813.02 | 908.54 | 1814.03 | 907.52 | 605.35 |
| SP311 | 1109 | Ac-LTF$r8AYWSQhL$AANleA-NH2 | | 1801.02 | 901.84 | 1802.03 | 901.52 | 601.35 |
| SP312 | 1110 | Ac-LTF$r8AYWSQhL$AANleA-NH2 | iso2 | 1801.02 | 902.62 | 1802.03 | 901.52 | 601.35 |
| SP313 | 1111 | Ac-LTF$r8AYWAQhL$AAAAa-NH2 | | 1814.01 | 908.63 | 1815.02 | 908.01 | 605.68 |
| SP314 | 1112 | Ac-LTF$r8AYWAQhL$AAAAa-NH2 | iso2 | 1814.01 | 908.34 | 1815.02 | 908.01 | 605.68 |
| SP315 | 1113 | Ac-LTF$r8AYWAQL$AAAAAa-NH2 | | 1871.04 | 936.94 | 1872.05 | 936.53 | 624.69 |
| SP316 | 1114 | Ac-LTF$r8AYWAQL$AAAAAAa-NH2 | iso2 | 1942.07 | 972.5 | 1943.08 | 972.04 | 648.37 |
| SP317 | 1115 | Ac-LTF$r8AYWAQL$AAAAAAa-NH2 | iso1 | 1942.07 | 972.5 | 1943.08 | 972.04 | 648.37 |
| SP318 | 1116 | Ac-LTF$r8EYWAQhL$AANleA-NH2 | | 1843.03 | 922.54 | 1844.04 | 922.52 | 615.35 |
| SP319 | 1117 | Ac-AATF$r8AYWAQL$AANleA-NH2 | | 1800 | 901.39 | 1801.01 | 901.01 | 601.01 |
| SP320 | 1118 | Ac-LTF$r8AYWAQL$AANleAA-NH2 | | 1842.04 | 922.45 | 1843.05 | 922.03 | 615.02 |
| SP321 | 1119 | Ac-ALTF$r8AYWAQL$AANleAA-NH2 | | 1913.08 | 957.94 | 1914.09 | 957.55 | 638.7 |
| SP322 | 1120 | Ac-LTF$r8AYWAQCba$AANleAA-NH2 | | 1854.04 | 928.43 | 1855.05 | 928.03 | 619.02 |
| SP323 | 1121 | Ac-LTF$r8AYWAQhL$AANleAA-NH2 | | 1856.06 | 929.4 | 1857.07 | 929.04 | 619.69 |
| SP324 | 1122 | Ac-LTF$r8EYWAQCba$SAAA-NH2 | | 1814.96 | 909.37 | 1815.97 | 908.49 | 605.99 |
| SP325 | 1123 | Ac-LTF$r8EYWAQCba$SAAA-NH2 | iso2 | 1814.96 | 909.37 | 1815.97 | 908.49 | 605.99 |
| SP326 | 1124 | Ac-LTF$r8EYWAQCba$SAAAA-NH2 | | 1886 | 944.61 | 1887.01 | 944.01 | 629.67 |
| SP327 | 1125 | Ac-LTF$r8EYWAQCba$SAAAA-NH2 | iso2 | 1886 | 944.61 | 1887.01 | 944.01 | 629.67 |
| SP328 | 1126 | Ac-ALTF$r8EYWAQCba$SAA-NH2 | | 1814.96 | 909.09 | 1815.97 | 908.49 | 605.99 |
| SP329 | 1127 | Ac-ALTF$r8EYWAQCba$SAAA-NH2 | | 1886 | 944.61 | 1887.01 | 944.01 | 629.67 |
| SP330 | 1128 | Ac-ALTF$r8EYWAQCba$SAA-NH2 | iso2 | 1814.96 | 909.09 | 1815.97 | 908.49 | 605.99 |
| SP331 | 1129 | Ac-LTF$r8EYWAQL$AAAAAa-NH2 | iso2 | 1929.04 | 966.08 | 1930.05 | 965.53 | 644.02 |
| SP332 | 1130 | Ac-LTF$r8EY6clWAQCba$SAA-NH2 | | 1777.89 | 890.78 | 1778.9 | 889.95 | 593.64 |
| SP333 | 1131 | Ac-LTF$r8EF4cooh6clWAQCba$SANleA-NH2 | | 1918.96 | 961.27 | 1919.97 | 960.49 | 640.66 |
| SP334 | 1132 | Ac-LTF$r8EF4cooh6clWAQCba$SANleA-NH2 | iso2 | 1918.96 | 961.27 | 1919.97 | 960.49 | 640.66 |
| SP335 | 1133 | Ac-LTF$r8EF4cooh6clWAQCba$AAIa-NH2 | | 1902.97 | 953.03 | 1903.98 | 952.49 | 635.33 |
| SP336 | 1134 | Ac-LTF$r8EF4cooh6clWAQCba$AAIa-NH2 | iso2 | 1902.97 | 953.13 | 1903.98 | 952.49 | 635.33 |
| SP337 | 1135 | Ac-LTF$r8AY6clWAQL$AAAAAa-NH2 | | 1905 | 954.61 | 1906.01 | 953.51 | 636.01 |
| SP338 | 1136 | Ac-LTF$r8AY6clWAQL$AAAAAa-NH2 | iso2 | 1905 | 954.9 | 1906.01 | 953.51 | 636.01 |
| SP339 | 1137 | Ac-F$r8AY6clWEAL$AAAAAAa-NH2 | | 1762.89 | 883.01 | 1763.9 | 882.45 | 588.64 |
| SP340 | 1138 | Ac-ETF$r8EYWAQL$AAAAAa-NH2 | | 1945 | 974.31 | 1946.01 | 973.51 | 649.34 |
| SP341 | 1139 | Ac-ETF$r8EYWAQL$AAAAAa-NH2 | iso2 | 1945 | 974.49 | 1946.01 | 973.51 | 649.34 |
| SP342 | 1140 | Ac-LTF$r8EYWAQL$AAAAAAa-NH2 | | 2000.08 | 1001.6 | 2001.09 | 1001.05 | 667.7 |
| SP343 | 1141 | Ac-LTF$r8EYWAQL$AAAAAAa-NH2 | iso2 | 2000.08 | 1001.6 | 2001.09 | 1001.05 | 667.7 |
| SP344 | 1142 | Ac-LTF$r8AYWAQL$AANleAAa-NH2 | | 1913.08 | 958.58 | 1914.09 | 957.55 | 638.7 |
| SP345 | 1143 | Ac-LTF$r8AYWAQL$AANleAAa-NH2 | iso2 | 1913.08 | 958.58 | 1914.09 | 957.55 | 638.7 |
| SP346 | 1144 | Ac-LTF$r8EYWAQCba$AAAAAa-NH2 | | 1941.04 | 972.55 | 1942.05 | 971.53 | 648.02 |
| SP347 | 1145 | Ac-LTF$r8EYWAQCba$AAAAAa-NH2 | iso2 | 1941.04 | 972.55 | 1942.05 | 971.53 | 648.02 |
| SP348 | 1146 | Ac-LTF$r8EF4coohWAQCba$AAAAAa-NH2 | | 1969.04 | 986.33 | 1970.05 | 985.53 | 657.35 |
| SP349 | 1147 | Ac-LTF$r8EF4coohWAQCba$AAAAAa-NH2 | iso2 | 1969.04 | 986.06 | 1970.05 | 985.53 | 657.35 |
| SP350 | 1148 | Ac-LTF$r8EYWSQCba$AAAAAa-NH2 | | 1957.04 | 980.04 | 1958.05 | 979.53 | 653.35 |
| SP351 | 1149 | Ac-LTF$r8EYWSQCba$AAAAAa-NH2 | iso2 | 1957.04 | 980.04 | 1958.05 | 979.53 | 653.35 |
| SP352 | 1150 | Ac-LTF$r8EYWAQCba$SAAa-NH2 | | 1814.96 | 909 | 1815.97 | 908.49 | 605.99 |
| SP353 | 1151 | Ac-LTF$r8EYWAQCba$SAAa-NH2 | iso2 | 1814.96 | 909 | 1815.97 | 908.49 | 605.99 |
| SP354 | 1152 | Ac-ALTF$r8EYWAQCba$SAAa-NH2 | | 1886 | 944.52 | 1887.01 | 944.01 | 629.67 |
| SP355 | 1153 | Ac-ALTF$r8EYWAQCba$SAAa-NH2 | iso2 | 1886 | 944.98 | 1887.01 | 944.01 | 629.67 |
| SP356 | 1154 | Ac-ALTF$r8EYWAQCba$SAAAa-NH2 | | 1957.04 | 980.04 | 1958.05 | 979.53 | 653.35 |
| SP357 | 1155 | Ac-ALTF$r8EYWAQCba$SAAAa-NH2 | iso2 | 1957.04 | 980.04 | 1958.05 | 979.53 | 653.35 |
| SP358 | 1156 | Ac-AALTF$r8EYWAQCba$SAAAa-NH2 | | 2028.07 | 1016.1 | 2029.08 | 1015.04 | 677.03 |
| SP359 | 1157 | Ac-AALTF$r8EYWAQCba$SAAAa-NH2 | iso2 | 2028.07 | 1015.57 | 2029.08 | 1015.04 | 677.03 |
| SP360 | 1158 | Ac-RTF$r8EYWAQCba$SAA-NH2 | | 1786.94 | 895.03 | 1787.95 | 894.48 | 596.65 |
| SP361 | 1159 | Ac-LRF$r8EYWAQCba$SAA-NH2 | | 1798.98 | 901.51 | 1799.99 | 900.5 | 600.67 |
| SP362 | 1160 | Ac-LTF$r8EYWRQCba$SAA-NH2 | | 1828.99 | 916.4 | 1830 | 915.5 | 610.67 |
| SP363 | 1161 | Ac-LTF$r8EYWARCba$SAA-NH2 | | 1771.97 | 887.63 | 1772.98 | 886.99 | 591.66 |
| SP364 | 1162 | Ac-LTF$r8EYWAQCba$RAA-NH2 | | 1812.99 | 908.08 | 1814 | 907.5 | 605.34 |
| SP365 | 1163 | Ac-LTF$r8EYWAQCba$SRA-NH2 | | 1828.99 | 916.12 | 1830 | 915.5 | 610.67 |
| SP366 | 1164 | Ac-LTF$r8EYWAQCba$SAR-NH2 | | 1828.99 | 916.12 | 1830 | 915.5 | 610.67 |
| SP367 | 1165 | 5-FAM-BaLTF$r8EYWAQCba$SAA-NH2 | | 2131 | 1067.09 | 2132.01 | 1066.51 | 711.34 |
| SP368 | 1166 | 5-FAM-BaLTF$r8AYWAQL$AANleA-NH2 | | 2158.08 | 1080.6 | 2159.09 | 1080.05 | 720.37 |
| SP369 | 1167 | Ac-LAF$r8EYWAQL$AANleA-NH2 | | 1799 | 901.05 | 1800.01 | 900.51 | 600.67 |
| SP370 | 1168 | Ac-ATF$r8EYWAQL$AANleA-NH2 | | 1786.97 | 895.03 | 1787.98 | 894.49 | 596.66 |
| SP371 | 1169 | Ac-AAF$r8EYWAQL$AANleA-NH2 | | 1756.96 | 880.05 | 1757.97 | 879.49 | 586.66 |
| SP372 | 1170 | Ac-AAAF$r8EYWAQL$AANleA-NH2 | | 1827.99 | 915.57 | 1829 | 915 | 610.34 |
| SP373 | 1171 | Ac-AAAAF$r8EYWAQL$AANleA-NH2 | | 1899.03 | 951.09 | 1900.04 | 950.52 | 634.02 |
| SP374 | 1172 | Ac-AATF$r8EYWAQL$AANleA-NH2 | | 1858 | 930.92 | 1859.01 | 930.01 | 620.34 |
| SP375 | 1173 | Ac-AALTF$r8EYWAQL$AANleA-NH2 | | 1971.09 | 987.17 | 1972.1 | 986.55 | 658.04 |
| SP376 | 1174 | Ac-AAALTF$r8EYWAQL$AANleA-NH2 | | 2042.12 | 1023.15 | 2043.13 | 1022.07 | 681.71 |
| SP377 | 1175 | Ac-LTF$r8EYWAQL$AANleAA-NH2 | | 1900.05 | 952.02 | 1901.06 | 951.03 | 634.36 |
| SP378 | 1176 | Ac-ALTF$r8EYWAQL$AANleAA-NH2 | | 1971.09 | 987.63 | 1972.1 | 986.55 | 658.04 |
| SP379 | 1177 | Ac-AALTF$r8EYWAQL$AANleAA-NH2 | | 2042.12 | 1022.69 | 2043.13 | 1022.07 | 681.71 |
| SP380 | 1178 | Ac-LTF$r8EYWAQCba$AANleAA-NH2 | | 1912.05 | 958.03 | 1913.06 | 957.03 | 638.36 |
| SP381 | 1179 | Ac-LTF$r8EYWAQhL$AANleAA-NH2 | | 1914.07 | 958.68 | 1915.08 | 958.04 | 639.03 |
| SP382 | 1180 | Ac-ALTF$r8EYWAQhL$AANleAA-NH2 | | 1985.1 | 994.1 | 1986.11 | 993.56 | 662.71 |
| SP383 | 1181 | Ac-LTF$r8ANmYWAQL$AANleA-NH2 | | 1785.02 | 894.11 | 1786.03 | 893.52 | 596.01 |
| SP384 | 1182 | Ac-LTF$r8ANmYWAQL$AANleA-NH2 | iso2 | 1785.02 | 894.11 | 1786.03 | 893.52 | 596.01 |
| SP385 | 1183 | Ac-LTF$r8AYNmWAQL$AANleA-NH2 | | 1785.02 | 894.11 | 1786.03 | 893.52 | 596.01 |
| SP386 | 1184 | Ac-LTF$r8AYNmWAQL$AANleA-NH2 | iso2 | 1785.02 | 894.11 | 1786.03 | 893.52 | 596.01 |
| SP387 | 1185 | Ac-LTF$r8AYAmwAQL$AANleA-NH2 | | 1785.02 | 894.01 | 1786.03 | 893.52 | 596.01 |
| SP388 | 1186 | Ac-LTF$r8AYAmwAQL$AANleA-NH2 | iso2 | 1785.02 | 894.01 | 1786.03 | 893.52 | 596.01 |
| SP389 | 1187 | Ac-LTF$r8AYWAibQL$AANleA-NH2 | | 1785.02 | 894.01 | 1786.03 | 893.52 | 596.01 |
| SP390 | 1188 | Ac-LTF$r8AYWAibQL$AANleA-NH2 | iso2 | 1785.02 | 894.01 | 1786.03 | 893.52 | 596.01 |
| SP391 | 1189 | Ac-LTF$r8AYWAQL$AAibNleA-NH2 | | 1785.02 | 894.38 | 1786.03 | 893.52 | 596.01 |
| SP392 | 1190 | Ac-LTF$r8AYWAQL$AAibNleA-NH2 | iso2 | 1785.02 | 894.38 | 1786.03 | 893.52 | 596.01 |
| SP393 | 1191 | Ac-LTF$r8AYWAQL$AaNleA-NH2 | | 1771.01 | 887.54 | 1772.02 | 886.51 | 591.34 |
| SP394 | 1192 | Ac-LTF$r8AYWAQL$AaNleA-NH2 | iso2 | 1771.01 | 887.54 | 1772.02 | 886.51 | 591.34 |
| SP395 | 1193 | Ac-LTF$r8AYWAQL$ASarNleA-NH2 | | 1771.01 | 887.35 | 1772.02 | 886.51 | 591.34 |
| SP396 | 1194 | Ac-LTF$r8AYWAQL$ASarNleA-NH2 | iso2 | 1771.01 | 887.35 | 1772.02 | 886.51 | 591.34 |
| SP397 | 1195 | Ac-LTF$r8AYWAQL$AANleAib-NH2 | | 1785.02 | 894.75 | 1786.03 | 893.52 | 596.01 |
| SP398 | 1196 | Ac-LTF$r8AYWAQL$AANleAib-NH2 | iso2 | 1785.02 | 894.75 | 1786.03 | 893.52 | 596.01 |
| SP399 | 1197 | Ac-LTF$r8AYWAQL$AANleNmA-NH2 | | 1785.02 | 894.6 | 1786.03 | 893.52 | 596.01 |
| SP400 | 1198 | Ac-LTF$r8AYWAQL$AANleNmA-NH2 | iso2 | 1785.02 | 894.6 | 1786.03 | 893.52 | 596.01 |
| SP401 | 1199 | Ac-LTF$r8AYWAQL$AANleSar-NH2 | | 1771.01 | 886.98 | 1772.02 | 886.51 | 591.34 |
| SP402 | 1200 | Ac-LTF$r8AYWAQL$AANleSar-NH2 | iso2 | 1771.01 | 886.98 | 1772.02 | 886.51 | 591.34 |
| SP403 | 1201 | Ac-LTF$r8AYWAQL$AANleAAib-NH2 | | 1856.06 | | 1857.07 | 929.04 | 619.69 |
| SP404 | 1202 | Ac-LTF$r8AYWAQL$AANleAAib-NH2 | iso2 | 1856.06 | | 1857.07 | 929.04 | 619.69 |
| SP405 | 1203 | Ac-LTF$r8AYWAQL$AANleANmA-NH2 | | 1856.06 | 930.37 | 1857.07 | 929.04 | 619.69 |
| SP406 | 1204 | Ac-LTF$r8AYWAQL$AANleANmA-NH2 | iso2 | 1856.06 | 930.37 | 1857.07 | 929.04 | 619.69 |
| SP407 | 1205 | Ac-LTF$r8AYWAQL$AANleAa-NH2 | | 1842.04 | 922.69 | 1843.05 | 922.03 | 615.02 |
| SP408 | 1206 | Ac-LTF$r8AYWAQL$AANleAa-NH2 | iso2 | 1842.04 | 922.69 | 1843.05 | 922.03 | 615.02 |
| SP409 | 1207 | Ac-LTF$r8AYWAQL$AANleASar-NH2 | | 1842.04 | 922.6 | 1843.05 | 922.03 | 615.02 |
| SP410 | 1208 | Ac-LTF$r8AYWAQL$AANleASar-NH2 | iso2 | 1842.04 | 922.6 | 1843.05 | 922.03 | 615.02 |
| SP411 | 1209 | Ac-LTF$/r8AYWAQL$/AANleA-NH2 | | 1799.04 | 901.14 | 1800.05 | 900.53 | 600.69 |
| SP412 | 1210 | Ac-LTFAibAYWAQLAibAANleA-NH2 | | 1648.9 | 826.02 | 1649.91 | 825.46 | 550.64 |
| SP413 | 1211 | Ac-LTF$r8Cou4YWAQL$AANleA-NH2 | | 1975.05 | 989.11 | 1976.06 | 988.53 | 659.36 |
| SP414 | 1212 | Ac-LTF$r8Cou4YWAQL$AANleA-NH2 | iso2 | 1975.05 | 989.11 | 1976.06 | 988.53 | 659.36 |
| SP415 | 1213 | Ac-LTF$r8AYWCou4QL$AANleA-NH2 | | 1975.05 | 989.11 | 1976.06 | 988.53 | 659.36 |
| SP416 | 1214 | Ac-LTF$r8AYWAQL$Cou4ANleA-NH2 | | 1975.05 | 989.57 | 1976.06 | 988.53 | 659.36 |
| SP417 | 1215 | Ac-LTF$r8AYWAQL$Cou4ANleA-NH2 | iso2 | 1975.05 | 989.57 | 1976.06 | 988.53 | 659.36 |
| SP418 | 1216 | Ac-LTF$r8AYWAQL$ACou4NleA-NH2 | | 1975.05 | 989.57 | 1976.06 | 988.53 | 659.36 |
| SP419 | 1217 | Ac-LTF$r8AYWAQL$ACou4NleA-NH2 | iso2 | 1975.05 | 989.57 | 1976.06 | 988.53 | 659.36 |
| SP420 | 1218 | Ac-LTF$r8AYWAQL$AANleA-OH | | 1771.99 | 887.63 | 1773 | 887 | 591.67 |
| SP421 | 1219 | Ac-LTF$r8AYWAQL$AANleA-OH | iso2 | 1771.99 | 887.63 | 1773 | 887 | 591.67 |
| SP422 | 1220 | Ac-LTF$r8AYWAQL$AANleA-NHnPr | | 1813.05 | 908.08 | 1814.06 | 907.53 | 605.36 |
| SP423 | 1221 | Ac-LTF$r8AYWAQL$AANleA-NHnPr | iso2 | 1813.05 | 908.08 | 1814.06 | 907.53 | 605.36 |
| SP424 | 1222 | Ac-LTF$r8AYWAQL$AANleA-NHnBu33Me | | 1855.1 | 929.17 | 1856.11 | 928.56 | 619.37 |
| SP425 | 1223 | Ac-LTF$r8AYWAQL$AANleA-NHnBu33Me | iso2 | 1855.1 | 929.17 | 1856.11 | 928.56 | 619.37 |
| SP426 | 1224 | Ac-LTF$r8AYWAQL$AANleA-NHHex | | 1855.1 | 929.17 | 1856.11 | 928.56 | 619.37 |
| SP427 | 1225 | Ac-LTF$r8AYWAQL$AANleA-NHHex | iso2 | 1855.1 | 929.17 | 1856.11 | 928.56 | 619.37 |
| SP428 | 1226 | Ac-LTA$r8AYWAQL$AANleA-NH2 | | 1694.98 | 849.33 | 1695.99 | 848.5 | 566 |
| SP429 | 1227 | Ac-LThL$r8AYWAQL$AANleA-NH2 | | 1751.04 | 877.09 | 1752.05 | 876.53 | 584.69 |
| SP430 | 1228 | Ac-LTF$r8AYAAQL$AANleA-NH2 | | 1655.97 | 829.54 | 1656.98 | 828.99 | 553 |
| SP431 | 1229 | Ac-LTF$r8AY2NalAQL$AANleA-NH2 | | 1782.01 | 892.63 | 1783.02 | 892.01 | 595.01 |
| SP432 | 1230 | Ac-LTF$r8EYWCou4QCba$SAA-NH2 | | 1947.97 | 975.8 | 1948.98 | 974.99 | 650.33 |
| SP433 | 1231 | Ac-LTF$r8EYWCou7QCba$SAA-NH2 | | 16.03 | 974.9 | 17.04 | 9.02 | 6.35 |
| SP434 | 1232 | Ac-LTF%r8EYWAQCba%SAA-NH2 | | 1745.94 | 874.8 | 1746.95 | 873.98 | 582.99 |
| SP435 | 1233 | Dmaac-LTF$r8EYWAQCba$SAA-NH2 | | 1786.97 | 894.8 | 1787.98 | 894.49 | 596.66 |
| SP436 | 1234 | Dmaac-LTF$r8AYWAQL$AAAAAa-NH2 | | 1914.08 | 958.2 | 1915.09 | 958.05 | 639.03 |
| SP437 | 1235 | Dmaac-LTF$r8AYWAQL$AAAAAa-NH2 | iso2 | 1914.08 | 958.2 | 1915.09 | 958.05 | 639.03 |
| SP438 | 1236 | Dmaac-LTF$r8EYWAQL$AAAAAa-NH2 | | 1972.08 | 987.3 | 1973.09 | 987.05 | 658.37 |
| SP439 | 1237 | Dmaac-LTF$r8EYWAQL$AAAAAa-NH2 | iso2 | 1972.08 | 987.3 | 1973.09 | 987.05 | 658.37 |
| SP440 | 1238 | Dmaac-LTF$r8EF4coohWAQCba$AAIa-NH2 | | 1912.05 | 957.4 | 1913.06 | 957.03 | 638.36 |
| SP441 | 1239 | Dmaac-LTF$r8EF4coohWAQCba$AAIa-NH2 | iso2 | 1912.05 | 957.4 | 1913.06 | 957.03 | 638.36 |
| SP442 | 1240 | Dmaac-LTF$r8AYWAQL$AANleA-NH2 | | 1814.05 | 908.3 | 1815.06 | 908.03 | 605.69 |
| SP443 | 1241 | Dmaac-LTF$r8AYWAQL$AANleA-NH2 | iso2 | 1814.05 | 908.3 | 1815.06 | 908.03 | 605.69 |
| SP444 | 1242 | Ac-LTF%r8AYWAQL%AANleA-NH2 | | 1773.02 | 888.37 | 1774.03 | 887.52 | 592.01 |
| SP445 | 1243 | Ac-LTF%r8EYWAQL%AAAAAa-NH2 | | 1931.06 | 966.4 | 1932.07 | 966.54 | 644.69 |
| SP446 | 1244 | Cou6BaLTF$r8EYWAQhL$SAA-NH2 | | 2018.05 | 1009.9 | 2019.06 | 1010.03 | 673.69 |
| SP447 | 1245 | Cou8BaLTF$r8EYWAQhL$SAA-NH2 | | 1962.96 | 982.34 | 1963.97 | 982.49 | 655.32 |
| SP448 | 1246 | Ac-LTF4I$r8EYWAQL$AAAAAa-NH2 | | 2054.93 | 1028.68 | 2055.94 | 1028.47 | 685.98 |
| SP449 | 1247 | Ac-LTF$r8EYWAQL$AAAAAa-NH2 | | 1929.04 | 966.17 | 1930.05 | 965.53 | 644.02 |
| SP550 | 1248 | Ac-LTF$r8EYWAQL$AAAAAa-OH | | 1930.02 | 966.54 | 1931.03 | 966.02 | 644.35 |
| SP551 | 1249 | Ac-LTF$r8EYWAQL$AAAAAa-OH | iso2 | 1930.02 | 965.89 | 1931.03 | 966.02 | 644.35 |
| SP552 | 1250 | Ac-LTF$r8EYWAEL$AAAAAa-NH2 | | 1930.02 | 966.82 | 1931.03 | 966.02 | 644.35 |
| SP553 | 1251 | Ac-LTF$r8EYWAEL$AAAAAa-NH2 | iso2 | 1930.02 | 966.91 | 1931.03 | 966.02 | 644.35 |
| SP554 | 1252 | Ac-LTF$r8EYWAEL$AAAAAa-OH | | 1931.01 | 967.28 | 1932.02 | 966.51 | 644.68 |
| SP555 | 1253 | Ac-LTF$r8EY6clWAQL$AAAAAa-NH2 | | 1963 | 983.28 | 1964.01 | 982.51 | 655.34 |
| SP556 | 1254 | Ac-LTF$r8EF4bOH2WAQL$AAAAAa-NH2 | | 1957.05 | 980.04 | 1958.06 | 979.53 | 653.36 |
| SP557 | 1255 | Ac-AAALTF$r8EYWAQL$AAAAAa-NH2 | | 2142.15 | 1072.83 | 2143.16 | 1072.08 | 715.06 |
| SP558 | 1256 | Ac-LTF34F2$r8EYWAQL$AAAAAa-NH2 | | 1965.02 | 984.3 | 1966.03 | 983.52 | 656.01 |
| SP559 | 1257 | Ac-RTF$r8EYWAQL$AAAAAa-NH2 | | 1972.06 | 987.81 | 1973.07 | 987.04 | 658.36 |
| SP560 | 1258 | Ac-LTA$r8EYWAQL$AAAAAa-NH2 | | 1853.01 | 928.33 | 1854.02 | 927.51 | 618.68 |
| SP561 | 1259 | Ac-LTF$r8EYWAibQL$AAAAAa-NH2 | | 1943.06 | 973.48 | 1944.07 | 972.54 | 648.69 |
| SP562 | 1260 | Ac-LTF$r8EYWAQL$AAibAAAa-NH2 | | 1943.06 | 973.11 | 1944.07 | 972.54 | 648.69 |
| SP563 | 1261 | Ac-LTF$r8EYWAQL$AAAibAAa-NH2 | | 1943.06 | 973.48 | 1944.07 | 972.54 | 648.69 |
| SP564 | 1262 | Ac-LTF$r8EYWAQL$AAAAibAa-NH2 | | 1943.06 | 973.48 | 1944.07 | 972.54 | 648.69 |
| SP565 | 1263 | Ac-LTF$r8EYWAQL$AAAAAiba-NH2 | | 1943.06 | 973.38 | 1944.07 | 972.54 | 648.69 |
| SP566 | 1264 | Ac-LTF$r8EYWAQL$AAAAAiba-NH2 | iso2 | 1943.06 | 973.38 | 1944.07 | 972.54 | 648.69 |
| SP567 | 1265 | Ac-LTF$r8EYWAQL$AAAAAAib-NH2 | | 1943.06 | 973.01 | 1944.07 | 972.54 | 648.69 |
| SP568 | 1266 | Ac-LTF$r8EYWAQL$AaAAAa-NH2 | | 1929.04 | 966.54 | 1930.05 | 965.53 | 644.02 |
| SP569 | 1267 | Ac-LTF$r8EYWAQL$AAaAAa-NH2 | | 1929.04 | 966.35 | 1930.05 | 965.53 | 644.02 |
| SP570 | 1268 | Ac-LTF$r8EYWAQL$AAAaAa-NH2 | | 1929.04 | 966.54 | 1930.05 | 965.53 | 644.02 |
| SP571 | 1269 | Ac-LTF$r8EYWAQL$AAAaAa-NH2 | iso2 | 1929.04 | 966.35 | 1930.05 | 965.53 | 644.02 |
| SP572 | 1270 | Ac-LTF$r8EYWAQL$AAAAaa-NH2 | | 1929.04 | 966.35 | 1930.05 | 965.53 | 644.02 |
| SP573 | 1271 | Ac-LTF$r8EYWAQL$AAAAAA-NH2 | | 1929.04 | 966.35 | 1930.05 | 965.53 | 644.02 |
| SP574 | 1272 | Ac-LTF$r8EYWAQL$ASarAAAa-NH2 | | 1929.04 | 966.54 | 1930.05 | 965.53 | 644.02 |
| SP575 | 1273 | Ac-LTF$r8EYWAQL$AASarAAa-NH2 | | 1929.04 | 966.35 | 1930.05 | 965.53 | 644.02 |
| SP576 | 1274 | Ac-LTF$r8EYWAQL$AAASarAa-NH2 | | 1929.04 | 966.35 | 1930.05 | 965.53 | 644.02 |
| SP577 | 1275 | Ac-LTF$r8EYWAQL$AAAASara-NH2 | | 1929.04 | 966.35 | 1930.05 | 965.53 | 644.02 |
| SP578 | 1276 | Ac-LTF$r8EYWAQL$AAAAASar-NH2 | | 1929.04 | 966.08 | 1930.05 | 965.53 | 644.02 |
| SP579 | 1277 | Ac-7LTF$r8EYWAQL$AAAAAa-NH2 | | 1918.07 | 951.99 | 1919.08 | 960.04 | 640.37 |
| SP581 | 1278 | Ac-TF$r8EYWAQL$AAAAAa-NH2 | | 1815.96 | 929.85 | 1816.97 | 908.99 | 606.33 |
| SP582 | 1279 | Ac-F$r8EYWAQL$AAAAAa-NH2 | | 1714.91 | 930.92 | 1715.92 | 858.46 | 572.64 |
| SP583 | 1280 | Ac-LVF$r8EYWAQL$AAAAAa-NH2 | | 1927.06 | 895.12 | 1928.07 | 964.54 | 643.36 |
| SP584 | 1281 | Ac-AAF$r8EYWAQL$AAAAAa-NH2 | | 1856.98 | 859.51 | 1857.99 | 929.5 | 620 |
| SP585 | 1282 | Ac-LTF$r8EYWAQL$AAAAa-NH2 | | 1858 | 824.08 | 1859.01 | 930.01 | 620.34 |
| SP586 | 1283 | Ac-LTF$r8EYWAQL$AAAa-NH2 | | 1786.97 | 788.56 | 1787.98 | 894.49 | 596.66 |
| SP587 | 1284 | Ac-LTF$r8EYWAQL$AAa-NH2 | | 1715.93 | 1138.57 | 1716.94 | 858.97 | 572.98 |
| SP588 | 1285 | Ac-LTF$r8EYWAQL$Aa-NH2 | | 1644.89 | 1144.98 | 1645.9 | 823.45 | 549.3 |
| SP589 | 1286 | Ac-LTF$r8EYWAQL$a-NH2 | | 1573.85 | 1113.71 | 1574.86 | 787.93 | 525.62 |
| SP590 | 1287 | Ac-LTF$r8EYWAQL$AAA-OH | | 1716.91 | 859.55 | 1717.92 | 859.46 | 573.31 |
| SP591 | 1288 | Ac-LTF$r8EYWAQL$A-OH | | 1574.84 | 975.14 | 1575.85 | 788.43 | 525.95 |
| SP592 | 1289 | Ac-LTF$r8EYWAQL$AAA-NH2 | | 1715.93 | 904.75 | 1716.94 | 858.97 | 572.98 |
| SP593 | 1290 | Ac-LTF$r8EYWAQCba$SAA-OH | | 1744.91 | 802.49 | 1745.92 | 873.46 | 582.64 |
| SP594 | 1291 | Ac-LTF$r8EYWAQCba$S-OH | | 1602.83 | 913.53 | 1603.84 | 802.42 | 535.28 |
| SP595 | 1292 | Ac-LTF$r8EYWAQCba$S-NH2 | | 1601.85 | 979.58 | 1602.86 | 801.93 | 534.96 |
| SP596 | 1293 | 4-FBzl-LTF$r8EYWAQL$AAAAAa-NH2 | | 2009.05 | 970.52 | 2010.06 | 1005.53 | 670.69 |
| SP597 | 1294 | 4-FBzl-LTF$r8EYWAQCba$SAA-NH2 | | 1823.93 | 965.8 | 1824.94 | 912.97 | 608.98 |
| SP598 | 1295 | Ac-LTF$r8RYWAQL$AAAAAa-NH2 | | 1956.1 | 988.28 | 1957.11 | 979.06 | 653.04 |
| SP599 | 1296 | Ac-LTF$r8HYWAQL$AAAAAa-NH2 | | 1937.06 | 1003.54 | 1938.07 | 969.54 | 646.69 |
| SP600 | 1297 | Ac-LTF$r8QYWAQL$AAAAAa-NH2 | | 1928.06 | 993.92 | 1929.07 | 965.04 | 643.69 |
| SP601 | 1298 | Ac-LTF$r8CitYWAQL$AAAAAa-NH2 | | 1957.08 | 987 | 1958.09 | 979.55 | 653.37 |
| SP602 | 1299 | Ac-LTF$r8GlaYWAQL$AAAAAa-NH2 | | 1973.03 | 983 | 1974.04 | 987.52 | 658.68 |
| SP603 | 1300 | Ac-LTF$r8F4gYWAQL$AAAAAa-NH2 | | 2004.1 | 937.86 | 2005.11 | 1003.06 | 669.04 |
| SP604 | 1301 | Ac-LTF$r82mRYWAQL$AAAAAa-NH2 | | 1984.13 | 958.58 | 1985.14 | 993.07 | 662.38 |
| SP605 | 1302 | Ac-LTF$r8ipKYWAQL$AAAAAa-NH2 | | 1970.14 | 944.52 | 1971.15 | 986.08 | 657.72 |
| SP606 | 1303 | Ac-LTF$r8F4NH2YWAQL$AAAAAa-NH2 | | 1962.08 | 946 | 1963.09 | 982.05 | 655.03 |
| SP607 | 1304 | Ac-LTF$r8EYWAAL$AAAAAa-NH2 | | 1872.02 | 959.32 | 1873.03 | 937.02 | 625.01 |
| SP608 | 1305 | Ac-LTF$r8EYWALL$AAAAAa-NH2 | | 1914.07 | 980.88 | 1915.08 | 958.04 | 639.03 |
| SP609 | 1306 | Ac-LTF$r8EYWAAibL$AAAAAa-NH2 | | 1886.03 | 970.61 | 1887.04 | 944.02 | 629.68 |
| SP610 | 1307 | Ac-LTF$r8EYWASL$AAAAAa-NH2 | | 1888.01 | 980.51 | 1889.02 | 945.01 | 630.34 |
| SP611 | 1308 | Ac-LTF$r8EYWANL$AAAAAa-NH2 | | 1915.02 | 1006.41 | 1916.03 | 958.52 | 639.35 |
| SP612 | 1309 | Ac-LTF$r8EYWACitL$AAAAAa-NH2 | | 1958.07 | | 1959.08 | 980.04 | 653.7 |
| SP613 | 1310 | Ac-LTF$r8EYWAHL$AAAAAa-NH2 | | 1938.04 | 966.24 | 1939.05 | 970.03 | 647.02 |
| SP614 | 1311 | Ac-LTF$r8EYWARL$AAAAAa-NH2 | | 1957.08 | | 1958.09 | 979.55 | 653.37 |
| SP615 | 1312 | Ac-LTF$r8EpYWAQL$AAAAAa-NH2 | | 2009.01 | | 2010.02 | 1005.51 | 670.68 |
| SP616 | 1313 | Cbm-LTF$r8EYWAQCba$SAA-NH2 | | 1590.85 | | 1591.86 | 796.43 | 531.29 |
| SP617 | 1314 | Cbm-LTF$r8EYWAQL$AAAAAa-NH2 | | 1930.04 | | 1931.05 | 966.03 | 644.35 |
| SP618 | 1315 | Ac-LTF$r8EYWAQL$SAAAAa-NH2 | | 1945.04 | 1005.11 | 1946.05 | 973.53 | 649.35 |
| SP619 | 1316 | Ac-LTF$r8EYWAQL$AAAASa-NH2 | | 1945.04 | 986.52 | 1946.05 | 973.53 | 649.35 |
| SP620 | 1317 | Ac-LTF$r8EYWAQL$SAAASa-NH2 | | 1961.03 | 993.27 | 1962.04 | 981.52 | 654.68 |
| SP621 | 1318 | Ac-LTF$r8EYWAQTba$AAAAAa-NH2 | | 1943.06 | 983.1 | 1944.07 | 972.54 | 648.69 |
| SP622 | 1319 | Ac-LTF$r8EYWAQAdm$AAAAAa-NH2 | | 2007.09 | 990.31 | 2008.1 | 1004.55 | 670.04 |
| SP623 | 1320 | Ac-LTF$r8EYWAQCha$AAAAAa-NH2 | | 1969.07 | 987.17 | 1970.08 | 985.54 | 657.36 |
| SP624 | 1321 | Ac-LTF$r8EYWAQhCha$AAAAAa-NH2 | | 1983.09 | 1026.11 | 1984.1 | 992.55 | 662.04 |
| SP625 | 1322 | Ac-LTF$r8EYWAQF$AAAAAa-NH2 | | 1963.02 | 957.01 | 1964.03 | 982.52 | 655.35 |
| SP626 | 1323 | Ac-LTF$r8EYWAQhF$AAAAAa-NH2 | | 1977.04 | 1087.81 | 1978.05 | 989.53 | 660.02 |
| SP627 | 1324 | Ac-LTF$r8EYWAQL$AANleAAa-NH2 | | 1971.09 | 933.45 | 1972.1 | 986.55 | 658.04 |
| SP628 | 1325 | Ac-LTF$r8EYWAQAdm$AANleAAa-NH2 | | 2049.13 | 1017.97 | 2050.14 | 1025.57 | 684.05 |
| SP629 | 1326 | 4-FBz-BaLTF$r8EYWAQL$AAAAAa-NH2 | | 2080.08 | | 2081.09 | 1041.05 | 694.37 |
| SP630 | 1327 | 4-FBz-BaLTF$r8EYWAQCba$SAA-NH2 | | 1894.97 | | 1895.98 | 948.49 | 632.66 |
| SP631 | 1328 | Ac-LTF$r5EYWAQL$s8AAAAAa-NH2 | | 1929.04 | 1072.68 | 1930.05 | 965.53 | 644.02 |
| SP632 | 1329 | Ac-LTF$r5EYWAQCba$s8SAA-NH2 | | 1743.92 | 1107.79 | 1744.93 | 872.97 | 582.31 |
| SP633 | 1330 | Ac-LTF$r8EYWAQL$AAhhLAAa-NH2 | | 1999.12 | | 2000.13 | 1000.57 | 667.38 |
| SP634 | 1331 | Ac-LTF$r8EYWAQL$AAAAAAAa-NH2 | | 2071.11 | | 2072.12 | 1036.56 | 691.38 |
| SP635 | 1332 | Ac-LTF$r8EYWAQL$AAAAAAAAa-NH2 | | 2142.15 | 778.1 | 2143.16 | 1072.08 | 715.06 |
| SP636 | 1333 | Ac-LTF$r8EYWAQL$AAAAAAAAAa-NH2 | | 2213.19 | 870.53 | 2214.2 | 1107.6 | 738.74 |
| SP637 | 1334 | Ac-LTA$r8EYAAQCba$SAA-NH2 | | 1552.85 | | 1553.86 | 777.43 | 518.62 |
| SP638 | 1335 | Ac-LTA$r8EYAAQL$AAAAAa-NH2 | | 1737.97 | 779.45 | 1738.98 | 869.99 | 580.33 |
| SP639 | 1336 | Ac-LTF$r8EPmpWAQL$AAAAAa-NH2 | | 2007.03 | 779.54 | 2008.04 | 1004.52 | 670.02 |
| SP640 | 1337 | Ac-LTF$r8EPmpWAQCba$SAA-NH2 | | 1821.91 | 838.04 | 1822.92 | 911.96 | 608.31 |
| SP641 | 1338 | Ac-ATF$r8HYWAQL$S-NH2 | | 1555.82 | 867.83 | 1556.83 | 778.92 | 519.61 |
| SP642 | 1339 | Ac-LTF$r8HAWAQL$S-NH2 | | 1505.84 | 877.91 | 1506.85 | 753.93 | 502.95 |
| SP643 | 1340 | Ac-LTF$r8HYWAQA$S-NH2 | | 1555.82 | 852.52 | 1556.83 | 778.92 | 519.61 |
| SP644 | 1341 | Ac-LTF$r8EYWAQCba$SA-NH2 | | 1672.89 | 887.18 | 1673.9 | 837.45 | 558.64 |
| SP645 | 1342 | Ac-LTF$r8EYWAQL$SAA-NH2 | | 1731.92 | 873.32 | 1732.93 | 866.97 | 578.31 |
| SP646 | 1343 | Ac-LTF$r8HYWAQCba$SAA-NH2 | | 1751.94 | 873.05 | 1752.95 | 876.98 | 584.99 |
| SP647 | 1344 | Ac-LTF$r8SYWAQCba$SAA-NH2 | | 1701.91 | 844.88 | 1702.92 | 851.96 | 568.31 |
| SP648 | 1345 | Ac-LTF$r8RYWAQCba$SAA-NH2 | | 1770.98 | 865.58 | 1771.99 | 886.5 | 591.33 |
| SP649 | 1346 | Ac-LTF$r8KYWAQCba$SAA-NH2 | | 1742.98 | 936.57 | 1743.99 | 872.5 | 582 |
| SP650 | 1347 | Ac-LTF$r8QYWAQCba$SAA-NH2 | | 1742.94 | 930.93 | 1743.95 | 872.48 | 581.99 |
| SP651 | 1348 | Ac-LTF$r8EYWAACba$SAA-NH2 | | 1686.9 | 1032.45 | 1687.91 | 844.46 | 563.31 |
| SP652 | 1349 | Ac-LTF$r8EYWAQCba$AAA-NH2 | | 1727.93 | 895.46 | 1728.94 | 864.97 | 576.98 |
| SP653 | 1350 | Ac-LTF$r8EYWAQL$AAAAA-OH | | 1858.99 | 824.54 | 1860 | 930.5 | 620.67 |
| SP654 | 1351 | Ac-LTF$r8EYWAQL$AAAA-OH | | 1787.95 | 894.48 | 1788.96 | 894.98 | 596.99 |
| SP655 | 1352 | Ac-LTF$r8EYWAQL$AA-OH | | 1645.88 | 856 | 1646.89 | 823.95 | 549.63 |
| SP656 | 1353 | Ac-LTF$r8AF4bOH2WAQL$AAAAAa-NH2 | | | | | | |
| SP657 | 1354 | Ac-LTF$r8AF4bOH2WAAL$AAAAAa-NH2 | | | | | | |
| SP658 | 1355 | Ac-LTF$r8EF4bOH2WAQCba$SAA-NH2 | | | | | | |
| SP659 | 1356 | Ac-LTF$r8ApYWAQL$AAAAAa-NH2 | | | | | | |
| SP660 | 1357 | Ac-LTF$r8ApYWAAL$AAAAAa-NH2 | | | | | | |
| SP661 | 1358 | Ac-LTF$r8EpYWAQCba$SAA-NH2 | | | | | | |
| SP662 | 1359 | Ac-LTF$rda6AYWAQL$da5AAAAAa-NH2 | | 1974.06 | 934.44 | | | |
| SP663 | 1360 | Ac-LTF$rda6EYWAQCba$da5SAA-NH2 | | 1846.95 | 870.52 | | 869.94 | |
| SP664 | 1361 | Ac-LTF$rda6EYWAQL$da5AAAAAa-NH2 | | | | | | |
| SP665 | 1362 | Ac-LTF$ra9EYWAQL$a6AAAAAa-NH2 | | | 936.57 | | 935.51 | |
| SP666 | 1363 | Ac-LTF$ra9EYWAQL$a6AAAAAa-NH2 | | | | | | |
| SP667 | 1364 | Ac-LTF$ra9EYWAQCba$a6SAA-NH2 | | | | | | |
| SP668 | 1365 | Ac-LTA$ra9EYWAQCba$a6SAA-NH2 | | | | | | |
| SP669 | 1366 | 5-FAM-BaLTF$ra9EYWAQCba$a6SAA-NH2 | | | | | | |
| SP670 | 1367 | 5-FAM-BaLTF$r8EYWAQL$AAAAAa-NH2 | | 2316.11 | | | | |
| SP671 | 1368 | 5-FAM-BaLTF$/r8EYWAQL$/AAAAAa-NH2 | | 2344.15 | | | | |
| SP672 | 1369 | 5-FAM-BaLTA$r8EYWAQL$AAAAAa-NH2 | | 2240.08 | | | | |
| SP673 | 1370 | 5-FAM-BaLTF$r8AYWAQL$AAAAAa-NH2 | | 2258.11 | | | | |
| SP674 | 1371 | 5-FAM-BaATF$r8EYWAQL$AAAAAa-NH2 | | 2274.07 | | | | |
| SP675 | 1372 | 5-FAM-BaLAF$r8EYWAQL$AAAAAa-NH2 | | 2286.1 | | | | |
| SP676 | 1373 | 5-FAM-BaLTF$r8EAWAQL$AAAAAa-NH2 | | 2224.09 | | | | |
| SP677 | 1374 | 5-FAM-BaLTF$r8EYAAQL$AAAAAa-NH2 | | 2201.07 | | | | |
| SP678 | 1375 | 5-FAM-BaLTA$r8EYAAQL$AAAAAa-NH2 | | 2125.04 | | | | |
| SP679 | 1376 | 5-FAM-BaLTF$r8EYWAAL$AAAAAa-NH2 | | 2259.09 | | | | |
| SP680 | 1377 | 5-FAM-BaLTF$r8EYWAQA$AAAAAa-NH2 | | 2274.07 | | | | |
| SP681 | 1378 | 5-FAM-BaLTF$/r8EYWAQCba$/SAA-NH2 | | 2159.03 | | | | |
| SP682 | 1379 | 5-FAM-BaLTA$r8EYWAQCba$SAA-NH2 | | 2054.97 | | | | |
| SP683 | 1380 | 5-FAM-BaLTF$r8EYAAQCba$SAA-NH2 | | 2015.96 | | | | |
| SP684 | 1381 | 5-FAM-BaLTA$r8EYAAQCba$SAA-NH2 | | 1939.92 | | | | |
| SP685 | 1382 | 5-FAM-BaQSQQTF$r8NLWRLL$QN-NH2 | | 2495.23 | | | | |
| SP686 | 1383 | 5-TAMRA-BaLTF$r8EYWAQCba$SAA-NH2 | | 2186.1 | | | | |
| SP687 | 1384 | 5-TAMRA-BaLTA$r8EYWAQCba$SAA-NH2 | | 2110.07 | | | | |
| SP688 | 1385 | 5-TAMRA-BaLTF$r8EYAAQCba$SAA-NH2 | | 2071.06 | | | | |
| SP689 | 1386 | 5-TAMRA-BaLTA$r8EYAAQCba$SAA-NH2 | | 1995.03 | | | | |
| SP690 | 1387 | 5-TAMRA-BaLTF$/r8EYWAQCba$/SAA-NH2 | | 2214.13 | | | | |
| SP691 | 1388 | 5-TAMRA-BaLTF$r8EYWAQL$AAAAAa-NH2 | | 2371.22 | | | | |
| SP692 | 1389 | 5-TAMRA-BaLTA$r8EYWAQL$AAAAAa-NH2 | | 2295.19 | | | | |
| SP693 | 1390 | 5-TAMRA-BaLTF$/r8EYWAQL$/AAAAAa-NH2 | | 2399.25 | | | | |
| SP694 | 1391 | Ac-LTF$r8EYWCou7QCba$SAA-OH | | 1947.93 | | | | |
| SP695 | 1392 | Ac-LTF$r8EYWCou7QCba$S-OH | | 1805.86 | | | | |
| SP696 | 1393 | Ac-LTA$r8EYWCou7QCba$SAA-NH2 | | 1870.91 | | | | |
| SP697 | 1394 | Ac-LTF$r8EYACou7QCba$SAA-NH2 | | 1831.9 | | | | |
| SP698 | 1395 | Ac-LTA$r8EYACou7QCba$SAA-NH2 | | 1755.87 | | | | |
| SP699 | 1396 | Ac-LTF$/r8EYWCou7QCba$/SAA-NH2 | | 1974.98 | | | | |
| SP700 | 1397 | Ac-LTF$r8EYWCou7QL$AAAAAa-NH2 | | 2132.06 | | | | |
| SP701 | 1398 | Ac-LTF$/r8EYWCou7QL$/AAAAAa-NH2 | | 2160.09 | | | | |
| SP702 | 1399 | Ac-LTF$r8EYWCou7QL$AAAAA-OH | | 2062.01 | | | | |
| SP703 | 1400 | Ac-LTF$r8EYWCou7QL$AAAA-OH | | 1990.97 | | | | |
| SP704 | 1401 | Ac-LTF$r8EYWCou7QL$AAA-OH | | 1919.94 | | | | |
| SP705 | 1402 | Ac-LTF$r8EYWCou7QL$AA-OH | | 1848.9 | | | | |
| SP706 | 1403 | Ac-LTF$r8EYWCou7QL$A-OH | | 1777.86 | | | | |
| SP707 | 1404 | Ac-LTF$r8EYWAQL$AAAASa-NH2 | iso2 | | 974.4 | | 973.53 | |
| SP708 | 1405 | Ac-LTF$r8AYWAAL$AAAAAa-NH2 | iso2 | 1814.01 | 908.82 | 1815.02 | 908.01 | 605.68 |
| SP709 | 1406 | Biotin-BaLTF$r8EYWAQL$AAAAAa-NH2 | | 2184.14 | 1093.64 | 2185.15 | 1093.08 | 729.05 |
| SP710 | 1407 | Ac-LTF$r8HAWAQL$S-NH2 | iso2 | 1505.84 | 754.43 | 1506.85 | 753.93 | 502.95 |
| SP711 | 1408 | Ac-LTF$r8EYWAQCba$SA-NH2 | iso2 | 1672.89 | 838.05 | 1673.9 | 837.45 | 558.64 |
| SP712 | 1409 | Ac-LTF$r8HYWAQCba$SAA-NH2 | iso2 | 1751.94 | 877.55 | 1752.95 | 876.98 | 584.99 |
| SP713 | 1410 | Ac-LTF$r8SYWAQCba$SAA-NH2 | iso2 | 1701.91 | 852.48 | 1702.92 | 851.96 | 568.31 |
| SP714 | 1411 | Ac-LTF$r8RYWAQCba$SAA-NH2 | iso2 | 1770.98 | 887.45 | 1771.99 | 886.5 | 591.33 |
| SP715 | 1412 | Ac-LTF$r8KYWAQCba$SAA-NH2 | iso2 | 1742.98 | 872.92 | 1743.99 | 872.5 | 582 |
| SP716 | 1413 | Ac-LTF$r8EYWAQCba$AAA-NH2 | iso2 | 1727.93 | 865.71 | 1728.94 | 864.97 | 576.98 |
| SP717 | 1414 | Ac-LTF$r8EYWAQL$AAAAAaBaC-NH2 | | 2103.09 | 1053.12 | 2104.1 | 1052.55 | 702.04 |
| SP718 | 1415 | Ac-LTF$r8EYWAQL$AAAAAadPeg4C-NH2 | | 2279.19 | 1141.46 | 2280.2 | 1140.6 | 760.74 |
| SP719 | 1416 | Ac-LTA$r8AYWAAL$AAAAAa-NH2 | | 1737.98 | 870.43 | 1738.99 | 870 | 580.33 |
| SP720 | 1417 | Ac-LTF$r8AYAAAL$AAAAAa-NH2 | | 1698.97 | 851 | 1699.98 | 850.49 | 567.33 |
| SP721 | 1418 | 5-FAM-BaLTF$r8AYWAAL$AAAAAa-NH2 | | 2201.09 | 1101.87 | 2202.1 | 1101.55 | 734.7 |
| SP722 | 1419 | Ac-LTA$r8AYWAQL$AAAAAa-NH2 | | 1795 | 898.92 | 1796.01 | 898.51 | 599.34 |
| SP723 | 1420 | Ac-LTF$r8AYAAQL$AAAAAa-NH2 | | 1755.99 | 879.49 | 1757 | 879 | 586.34 |
| SP724 | 1421 | Ac-LTF$rda6AYWAAL$da5AAAAAa-NH2 | | 1807.97 | | 1808.98 | 904.99 | 603.66 |
| SP725 | 1422 | FITC-BaLTF$r8EYWAQL$AAAAAa-NH2 | | 2347.1 | 1174.49 | 2348.11 | 1174.56 | 783.37 |
| SP726 | 1423 | FITC-BaLTF$r8EYWAQCba$SAA-NH2 | | 2161.99 | 1082.35 | 2163 | 1082 | 721.67 |
| SP733 | 1424 | Ac-LTF$r8EYWAQL$EAAAAa-NH2 | | 1987.05 | 995.03 | 1988.06 | 994.53 | 663.36 |
| SP734 | 1425 | Ac-LTF$r8AYWAQL$EAAAAa-NH2 | | 1929.04 | 966.35 | 1930.05 | 965.53 | 644.02 |
| SP735 | 1426 | Ac-LTF$r8EYWAQL$AAAAAaBaKbio-NH2 | | 2354.25 | 1178.47 | 2355.26 | 1178.13 | 785.76 |
| SP736 | 1427 | Ac-LTF$r8AYWAAL$AAAAAa-NH2 | | 1814.01 | 908.45 | 1815.02 | 908.01 | 605.68 |
| SP737 | 1428 | Ac-LTF$r8AYAAAL$AAAAAa-NH2 | iso2 | 1698.97 | 850.91 | 1699.98 | 850.49 | 567.33 |
| SP738 | 1429 | Ac-LTF$r8AYAAQL$AAAAAa-NH2 | iso2 | 1755.99 | 879.4 | 1757 | 879 | 586.34 |
| SP739 | 1430 | Ac-LTF$r8EYWAQL$EAAAAa-NH2 | iso2 | 1987.05 | 995.21 | 1988.06 | 994.53 | 663.36 |
| SP740 | 1431 | Ac-LTF$r8AYWAQL$EAAAAa-NH2 | iso2 | 1929.04 | 966.08 | 1930.05 | 965.53 | 644.02 |
| SP741 | 1432 | Ac-LTF$r8EYWAQCba$SAAAAa-NH2 | | 1957.04 | 980.04 | 1958.05 | 979.53 | 653.35 |
| SP742 | 1433 | Ac-LTF$r8EYWAQLStAAA$r5AA-NH2 | | 2023.12 | 1012.83 | 2024.13 | 1012.57 | 675.38 |
| SP743 | 1434 | Ac-LTF$r8EYWAQL$A$AAA$A-NH2 | | 2108.17 | 1055.44 | 2109.18 | 1055.09 | 703.73 |
| SP744 | 1435 | Ac-LTF$r8EYWAQL$AA$AAA$A-NH2 | | 2179.21 | 1090.77 | 2180.22 | 1090.61 | 727.41 |
| SP745 | 1436 | Ac-LTF$r8EYWAQL$AAA$AAA$A-NH2 | | 2250.25 | 1126.69 | 2251.26 | 1126.13 | 751.09 |
| SP746 | 1437 | Ac-AAALTF$r8EYWAQL$AAA-OH | | 1930.02 | | 1931.03 | 966.02 | 644.35 |
| SP747 | 1438 | Ac-AAALTF$r8EYWAQL$AAA-NH2 | | 1929.04 | 965.85 | 1930.05 | 965.53 | 644.02 |
| SP748 | 1439 | Ac-AAAALTF$r8EYWAQL$AAA-NH2 | | 2000.08 | 1001.4 | 2001.09 | 1001.05 | 667.7 |
| SP749 | 1440 | Ac-AAAAALTF$r8EYWAQL$AAA-NH2 | | 2071.11 | 1037.13 | 2072.12 | 1036.56 | 691.38 |
| SP750 | 1441 | Ac-AAAAAALTF$r8EYWAQL$AAA-NH2 | | 2142.15 | | 2143.16 | 1072.08 | 715.06 |
| SP751 | 1442 | Ac-LTF$rda6EYWAQCba$da6SAA-NH2 | iso2 | 1751.89 | 877.36 | 1752.9 | 876.95 | 584.97 |
| SP752 | 1443 | Ac-t$r5wya$r5f4CF3ekllr-NH2 | | | 844.25 | | | |
| SP753 | 1444 | Ac-tawy$r5nf4CF3e$r5llr-NH2 | | | 837.03 | | | |
| SP754 | 1445 | Ac-tawya$r5f4CF3ek$r5lr-NH2 | | | 822.97 | | | |
| SP755 | 1446 | Ac-tawyanf4CF3e$r5llr$r5a-NH2 | | | 908.35 | | | |
| SP756 | 1447 | Ac-t$s8wyanf4CF3e$r5llr-NH2 | | | 858.03 | | | |
| SP757 | 1448 | Ac-tawy$s8nf4CF3ekll$r5a-NH2 | | | 879.86 | | | |
| SP758 | 1449 | Ac-tawya$s8f4CF3ekllr$r5a-NH2 | | | 936.38 | | | |
| SP759 | 1450 | Ac-tawy$s8naekll$r5a-NH2 | | | 844.25 | | | |
| SP760 | 1451 | 5-FAM-Batawy$s8nf4CF3ekll$r5a-NH2 | | | | | | |
| SP761 | 1452 | 5-FAM-Batawy$s8naekll$r5a-NH2 | | | | | | |
| SP762 | 1453 | Ac-tawy$s8nf4CF3eall$r5a-NH2 | | | | | | |
| SP763 | 1454 | Ac-tawy$s8nf4CF3ekll$r5aaaaa-NH2 | | | | | | |
| SP764 | 1455 | Ac-tawy$s8nf4CF3eall$r5aaaaa-NH2 | | | | | | |

TABLE 11

| | SEQ | | | Exact | Found | Calc | Calc | Calc |
|---|---|---|---|---|---|---|---|---|
| SP | ID NO: | Sequence | Isomer | Mass | Mass | (M + 1)/1 | (M + 2)/2 | (M + 3)/3 |
| SP244 | 1456 | Ac-LTF$r8EF4coohWAQCba$SANleA-NH2 | | 1885 | 943.59 | 1886.01 | 943.51 | 629.34 |
| SP331 | 1457 | Ac-LTF$r8EYWAQL$AAAAAa-NH2 | iso2 | 1929.04 | 966.08 | 1930.05 | 965.53 | 644.02 |
| SP555 | 1458 | Ac-LTF$r8EY6clWAQL$AAAAAa-NH2 | | 1963 | 983.28 | 1964.01 | 982.51 | 655.34 |
| SP557 | 1459 | Ac-AAALTF$r8EYWAQL$AAAAAa-NH2 | | 2142.15 | 1072.83 | 2143.16 | 1072.08 | 715.06 |
| SP558 | 1460 | Ac-LTF34F2$r8EYWAQL$AAAAAa-NH2 | | 1965.02 | 984.3 | 1966.03 | 983.52 | 656.01 |
| SP562 | 1461 | Ac-LTF$r8EYWAQL$AAibAAAa-NH2 | | 1943.06 | 973.11 | 1944.07 | 972.54 | 648.69 |
| SP564 | 1462 | Ac-LTF$r8EYWAQL$AAAAibAa-NH2 | | 1943.06 | 973.48 | 1944.07 | 972.54 | 648.69 |
| SP566 | 1463 | Ac-LTF$r8EYWAQL$AAAAAiba-NH2 | iso2 | 1943.06 | 973.38 | 1944.07 | 972.54 | 648.69 |
| SP567 | 1464 | Ac-LTF$r8EYWAQL$AAAAAAib-NH2 | | 1943.06 | 973.01 | 1944.07 | 972.54 | 648.69 |
| SP572 | 1465 | Ac-LTF$r8EYWAQL$AAAAaa-NH2 | | 1929.04 | 966.35 | 1930.05 | 965.53 | 644.02 |
| SP573 | 1466 | Ac-LTF$r8EYWAQL$AAAAAA-NH2 | | 1929.04 | 966.35 | 1930.05 | 965.53 | 644.02 |
| SP578 | 1467 | Ac-LTF$r8EYWAQL$AAAAASar-NH2 | | 1929.04 | 966.08 | 1930.05 | 965.53 | 644.02 |
| SP551 | 1468 | Ac-LTF$r8EYWAQL$AAAAAa-OH | iso2 | 1930.02 | 965.89 | 1931.03 | 966.02 | 644.35 |
| SP662 | 1469 | Ac-LTF$rda6AYWAQL$da5AAAAAa-NH2 | | 1974.06 | 934.44 | | 933.49 | |
| SP367 | 1470 | 5-FAM-BaLTF$r8EYWAQCba$SAA-NH2 | | 2131 | 1067.09 | 2132.01 | 1066.51 | 711.34 |
| SP349 | 1471 | Ac-LTF$r8EF4coohWAQCba$AAAAAa-NH2 | iso2 | 1969.04 | 986.06 | 1970.05 | 985.53 | 657.35 |
| SP347 | 1472 | Ac-LTF$r8EYWAQCba$AAAAAa-NH2 | iso2 | 1941.04 | 972.55 | 1942.05 | 971.53 | 648.02 |

TABLE 12

| | | | | | | | | |
|---|---|---|---|---|---|---|---|---|
| | SEQ | | | Exact | Found | Calc | Calc | Calc |
| SP | ID NO: | Sequence | Isomer | Mass | Mass | (M + 1)/1 | (M + 2)/2 | (M + 3)/3 |

| | | | | | | | |
|---|---|---|---|---|---|---|---|
| SP581 | 1473 | Ac-TF$r8EYWAQL$AAAAAa-NH2 | 1815.96 | 929.85 | 1816.97 | 908.99 | 606.33 |
| SP582 | 1474 | Ac-F$r8EYWAQL$AAAAAa-NH2 | 1714.91 | 930.92 | 1715.92 | 858.46 | 572.64 |
| SP583 | 1475 | Ac-LVF$r8EYWAQL$AAAAAa-NH2 | 1927.06 | 895.12 | 1928.07 | 964.54 | 643.36 |
| SP584 | 1476 | Ac-AAF$r8EYWAQL$AAAAAa-NH2 | 1856.98 | 859.51 | 1857.99 | 929.5 | 620 |
| SP585 | 1477 | Ac-LTF$r8EYWAQL$AAAAa-NH2 | 1858 | 824.08 | 1859.01 | 930.01 | 620.34 |
| SP586 | 1478 | Ac-LTF$r8EYWAQL$AAAa-NH2 | 1786.97 | 788.56 | 1787.98 | 894.49 | 596.66 |
| SP587 | 1479 | Ac-LTF$r8EYWAQL$AAa-NH2 | 1715.93 | 1138.57 | 1716.94 | 858.97 | 572.98 |
| SP588 | 1480 | Ac-LTF$r8EYWAQL$Aa-NH2 | 1644.89 | 1144.98 | 1645.9 | 823.45 | 549.3 |
| SP589 | 1481 | Ac-LTF$r8EYWAQL$a-NH2 | 1573.85 | 1113.71 | 1574.86 | 787.93 | 525.62 |

[0509] In the sequences shown above and elsewhere, the following abbreviations are used: “Nle” represents norleucine, “Aib” represents 2-aminoisobutyric acid, “Ac” represents acetyl, and “Pr” represents propionyl. Amino acids represented as “$” are alpha-Me S5-pentenyl-alanine olefin amino acids connected by an all-carbon crosslinker comprising one double bond. Amino acids represented as “$r5” are alpha-Me R5-pentenyl-alanine olefin amino acids connected by an all-carbon comprising one double bond. Amino acids represented as “$s8” are alpha-Me S8-octenyl-alanine olefin amino acids connected by an all-carbon crosslinker comprising one double bond. Amino acids represented as “$r8” are alpha-Me R8-octenyl-alanine olefin amino acids connected by an all-carbon crosslinker comprising one double bond. “Ahx” represents an aminocyclohexyl linker. The crosslinkers are linear all-carbon crosslinker comprising eight or eleven carbon atoms between the alpha carbons of each amino acid. Amino acids represented as “$/” are alpha-Me S5-pentenyl-alanine olefin amino acids that are not connected by any crosslinker. Amino acids represented as “$/r5” are alpha-Me R5-pentenyl-alanine olefin amino acids that are not connected by any crosslinker. Amino acids represented as “$/s8” are alpha-Me S8-octenyl-alanine olefin amino acids that are not connected by any crosslinker. Amino acids represented as “$/r8” are alpha-Me R8-octenyl-alanine olefin amino acids that are not connected by any crosslinker. Amino acids represented as “Amw” are alpha-Me tryptophan amino acids. Amino acids represented as “Aml” are alpha-Me leucine amino acids. Amino acids represented as “Amf” are alpha-Me phenylalanine amino acids. Amino acids represented as “2ff” are 2-fluoro-phenylalanine amino acids. Amino acids represented as “3ff” are 3-fluoro-phenylalanine amino acids. Amino acids represented as “St” are amino acids comprising two pentenyl-alanine olefin side chains, each of which is crosslinked to another amino acid as indicated. Amino acids represented as “St//” are amino acids comprising two pentenyl-alanine olefin side chains that are not crosslinked. Amino acids represented as “% St” are amino acids comprising two pentenyl-alanine olefin side chains, each of which is crosslinked to another amino acid as indicated via fully saturated hydrocarbon crosslinks. Amino acids represented as “Ba” are beta-alanine. The lower-case character “e” or “z” within the designation of a crosslinked amino acid (e.g. “$er8” or “$zr8”) represents the configuration of the double bond (E or Z, respectively). In other contexts, lower-case letters such as “a” or “f” represent D amino acids (e.g. D-alanine, or D-phenylalanine, respectively). Amino acids designated as “NmW” represent N-methyltryptophan. Amino acids designated as “NmY” represent N-methyltyrosine. Amino acids designated as “NmA” represent N-methylalanine. “Kbio” represents a biotin group attached to the side chain amino group of a lysine residue. Amino acids designated as “Sar” represent sarcosine. Amino acids designated as “Cha” represent cyclohexyl alanine. Amino acids designated as “Cpg” represent cyclopentyl glycine. Amino acids designated as “Chg” represent cyclohexyl glycine. Amino acids designated as “Cba” represent cyclobutyl alanine. Amino acids designated as “F4I” represent 4-iodo phenylalanine. “7L” represents N15 isotopic leucine. Amino acids designated as “F3Cl” represent 3-chloro phenylalanine. Amino acids designated as “F4cooh” represent 4-carboxy phenylalanine. Amino acids designated as “F34F2” represent 3,4-difluoro phenylalanine. Amino acids designated as “6clW” represent 6-chloro tryptophan. Amino acids designated as “$rda6” represent alpha-Me R6-hexynyl-alanine alkynyl amino acids, crosslinked via a dialkyne bond to a second alkynyl amino acid. Amino acids designated as “$da5” represent alpha-Me S5-pentynyl-alanine alkynyl amino acids, wherein the alkyne forms one half of a dialkyne bond with a second alkynyl amino acid. Amino acids designated as “$ra9” represent alpha-Me R9-nonynyl-alanine alkynyl amino acids, crosslinked via an alkyne metathesis reaction with a second alkynyl amino acid. Amino acids designated as “$a6” represent alpha-Me S6-hexynyl-alanine alkynyl amino acids, crosslinked via an alkyne metathesis reaction with a second alkynyl amino acid. The designation “iso1” or “iso2” indicates that the peptidomimetic macrocycle is a single isomer.

[0510] Amino acids designated as “Cit” represent citrulline. Amino acids designated as “Cou4”, “Cou6”, “Cou7” and “Cou8”, respectively, represent the following structures:

[chemical structure]

[chemical structure]

[0511] In some embodiments, a peptidomimetic macrocycle is obtained in more than one isomer, for example due to the configuration of a double bond within the structure of the crosslinker (E vs Z). Such isomers can or can not be separable by conventional chromatographic methods. In some embodiments, one isomer has improved biological properties relative to the other isomer. In one embodiment, an E crosslinker olefin isomer of a peptidomimetic macrocycle has better solubility, better target affinity, better in vivo or in vitro efficacy, higher helicity, or improved cell permeability relative to its Z counterpart. In another embodiment, a Z crosslinker olefin isomer of a peptidomimetic macrocycle has better solubility, better target affinity, better in vivo or in vitro efficacy, higher helicity, or improved cell permeability relative to its E counterpart.

TABLE 13
(SEQ ID NOS 1482-1511, respectively, in order of appearance)
Structure

[chemical structure]

[chemical structure]

[chemical structure]

[chemical structure]

[chemical structure]

[chemical structure]

[chemical structure]

[chemical structure]

[chemical structure]

[chemical structure]

[chemical structure]

[chemical structure]

[chemical structure]

[chemical structure]

[chemical structure]

[chemical structure]

[chemical structure]

[chemical structure]

[chemical structure]

[chemical structure]

[chemical structure]

[chemical structure]

[chemical structure]

[chemical structure]

[chemical structure]

[chemical structure]

[chemical structure]

[chemical structure]

[chemical structure]

[chemical structure]

[0512] In some embodiments, peptidomimetic macrocycles exclude peptidomimetic macrocycles shown in Table 14. In some embodiments, peptidomimetic macrocycles do not comprise a peptidomimetic macrocycle structure as shown in Table 14.

TABLE 14

| Number | SEQ ID NO: | Sequence |
|---|---|---|
| 1 | 1512 | L$r5QETFSD$s8WKLLPEN |
| 2 | 1513 | LSQ$r5TFSDLW$s8LLPEN |
| 3 | 1514 | LSQE$r5FSDLWK$s8LPEN |
| 4 | 1515 | LSQET$r5SDLWKL$s8PEN |
| 5 | 1516 | LSQETF$r5DLWKLL$s8EN |
| 6 | 1517 | LXQETFS$r5LWKLLP$s8N |
| 7 | 1518 | LSQETFSD$r5WKLLPE$s8 |
| 8 | 1519 | LSQQTF$r5DLWKLL$s8EN |
| 9 | 1520 | LSQETF$r5DLWKLL$s8QN |
| 10 | 1521 | LSQQTF$r5DLWKLL$s8QN |
| 11 | 1522 | LSQETF$r5NLWKLL$s8QN |
| 12 | 1523 | LSQQTF$r5NLWKLL$s8QN |
| 13 | 1524 | LSQQTF$r5NLWRLL$s8QN |
| 14 | 1525 | QSQQTF$r5NLWKLL$s8QN |
| 15 | 1526 | QSQQTF$r5NLWRLL$s8QN |
| 16 | 1527 | QSQQTA$r5NLWRLL$s8QN |
| 17 | 1528 | L$r8QETFSD$WKLLPEN |
| 18 | 1529 | LSQ$r8TFSDLW$LLPEN |
| 19 | 1530 | LSQE$r8FSDLWK$LPEN |
| 20 | 1531 | LSQET$r8SDLWKL$PEN |
| 21 | 1532 | LSQETF$r8DLWKLL$EN |
| 22 | 1533 | LXQETFS$r8LWKLLP$N |
| 23 | 1534 | LSQETFSD$r8WKLLPE$ |
| 24 | 1535 | LSQQTF$r8DLWKLL$EN |
| 25 | 1536 | LSQETF$r8DLWKLL$QN |
| 26 | 1537 | LSQQTF$r8DLWKLL$QN |
| 27 | 1538 | LSQETF$r8NLWKLL$QN |
| 28 | 1539 | LSQQTF$r8NLWKLL$QN |
| 29 | 1540 | LSQQTF$r8NLWRLL$QN |
| 30 | 1541 | QSQQTF$r8NLWKLL$QN |
| 31 | 1542 | QSQQTF$r8NLWRLL$QN |
| 32 | 1543 | QSQQTA$r8NLWRLL$QN |
| 33 | 1544 | QSQQTF$r8NLWRKK$QN |
| 34 | 1545 | QQTF$r8DLWRLL$EN |
| 35 | 1546 | QQTF$r8DLWRLL$ |
| 36 | 1547 | LSQQTF$DLW$LL |
| 37 | 1548 | QQTF$DLW$LL |
| 38 | 1549 | QQTA$r8DLWRLL$EN |
| 39 | 1550 | QSQQTF$r5NLWRLL$s8QN |
| | | (dihydroxylated olefin) |
| 40 | 1551 | QSQQTA$r5NLWRLL$s8QN |
| | | (dihydroxylated olefin) |
| 41 | 1552 | QSQQTF$r8DLWRLL$QN |
| 42 | 1553 | QTF$r8NLWRLL$ |
| 43 | 1554 | QSQQTF$NLW$LLPQN |
| 44 | 1555 | QS$QTF$NLWRLLPQN |
| 45 | 1556 | $TFS$LWKLL |
| 46 | 1557 | ETF$DLW$LL |
| 47 | 1558 | QTF$NLW$LL |
| 48 | 1559 | $SQE$FSNLWKLL |

In Table 14, X represents S or any amino acid. Peptides shown can comprise an N-terminal capping group such as acetyl or an additional linker such as beta-alanine between the capping group and the start of the peptide sequence.

[0513] Table 15 shows examples of non-crosslinked polypeptides comprising D-amino acids.

TABLE 15

| | | | | | | | | |
|---|---|---|---|---|---|---|---|---|
| | SEQ | | | Exact | Found | Calc | Calc | Calc |
| SP | ID NO: | Sequence | Isomer | Mass | Mass | (M + 1)/1 | (M + 2)/2 | (M + 3)/3 |

| | | | |
|---|---|---|---|
| SP765 | 1560 | Ac-tawyanfekllr-NH2 | 777.46 |
| SP766 | 1561 | Ac-tawyanf4CF3ekllr-NH2 | 811.41 |

[0514] Peptidomimetic macrocycles are prepared as described herein and as in pending U.S. patent application Ser. No. 12/037,041, filed Feb. 25, 2008, which is hereby incorporated by reference in its entirety.

[0515] Generally, fully protected resin-bound peptides were synthesized on a PEG-PS resin (loading 0.45 mmol/g) on a 0.5 mmol scale. Deprotection of the temporary Fmoc group was achieved by 3×10 min treatments of the resin bound peptide with 20% (v/v) piperidine in DMF. After washing with NMP (3×), dichloromethane (3×) and NMP (3×), coupling of each successive amino acid was achieved with 1×60 min incubation with the appropriate preactivated Fmoc-amino acid derivative. All protected amino acids (1.0 mmol) were dissolved in NMP and activated with HCTU (1.0 mmol), Cl-HOBt (1.0 mmol) and DIEA (2.0 mmol) prior to transfer of the coupling solution to the deprotected resin-bound peptide. After coupling was completed, the resin was washed in preparation for the next deprotection/coupling cycle. Acetylation of the amino terminus was carried out in the presence of acetic anhydride/DIEA in NMP. The LC-MS analysis of a cleaved and deprotected sample obtained from an aliquot of the fully assembled resin-bound peptide was accomplished in order to verifying the completion of each coupling.

[0516] In a typical example for the preparation of a peptidomimetic macrocycle comprising a 1,4-triazole group (e.g. SP153), 20% (v/v) 2,6-lutidine in DMF was added to the peptide resin (0.5 mmol) in a 40 ml glass vial and shaken for 10 minutes. Sodium ascorbate (0.25 g, 1.25 mmol) and diisopropylethylamine (0.22 ml, 1.25 mmol) were then added, followed by copper(I) iodide (0.24 g, 1.25 mmol) and the resulting reaction mixture was mechanically shaken 16 hours at ambient temperature.

[0517] In a typical example for the preparation of a peptidomimetic macrocycle comprising a 1,5-triazole group (SP932, SP933), a peptide resin (0.25 mmol) was washed with anhydrous DCM. Resin was loaded into a microwave vial. Vessel was evacuated and purged with nitrogen. Chloro(penta-methylcyclopentadienyl) bis(triphenylphosphine)ruthenium(II), 10% loading, (Strem 44-0117) was added. Anhydrous toluene was added to the reaction vessel. The reaction was then loaded into the microwave and held at 90° C. for 10 minutes. Reaction may need to be pushed a subsequent time for completion. In other cases, chloro(1,5cyclooctadiene)(pentamethylcyclopenta-dienyl)ruthenium (“Cp*RuCl(cod)”) may be used, for example at at room temperature in a solvent comprising toluene.

[0518] In a typical example for the preparation of a peptidomimetic macrocycle comprising an iodo-substituted triazole group (e.g. SP457), THF (2 ml) was added to the peptide resin (0.05 mmol) in a 40 ml glass vial and shaken for 10 minutes. N-bromosuccimide (0.04 g, 0.25 mmol), copper(I) iodide (0.05 g, 0.25 mmol) and diisopropylethylamine (0.04 ml, 0.25 mmol) were then added and the resulting reaction mixture was mechanically shaken 16 hours at ambient temperature. Iodo-triazole crosslinkers may be further substituted by a coupling reaction, for example with boronic acids, to result in a peptidomimetic macrocycle such as SP465. In a typical example, DMF (3 ml) was added to the iodo-triazole peptide resin (0.1 mmol) in a 40 ml glass vial and shaken for 10 minutes. Phenyl boronic acid (0.04 g, 0.3 mmol), tetrakis(triphenylphosphine)palladium(0) (0.006 g, 0.005 mmol) and potassium carbonate (0.083 g, 0.6 mmol) were then added and the resulting reaction mixture was mechanically shaken 16 hours at 70° C. Iodo-triazole crosslinkers may also be further substituted by a coupling reaction, for example with a terminal alkyne (e.g. Sonogashira coupling), to result in a peptidomimetic macrocycle such as SP468. In a typical example, 2:1 THF:triethylamine (3 ml) was added to the iodo-triazole peptide resin (0.1 mmol) in a 40 ml glass vial and shaken for 10 minutes. N-BOC-4-pentyne-1-amine (0.04 g, 0.2 mmol) and bis(triphenylphosphine)palladiumchloride (0.014 g, 0.02 mmol) were added and shaken for 5 minutes. Copper(I) iodide (0.004 g, 0.02 mmol) was then added and the resulting reaction mixture was mechanically shaken 16 hours at 70° C.

[0519] The triazole-cyclized resin-bound peptides were deprotected and cleaved from the solid support by treatment with TFA/H₂O/TIS (95/5/5 v/v) for 2.5 h at room temperature. After filtration of the resin the TFA solution was precipitated in cold diethyl ether and centrifuged to yield the desired product as a solid. The crude product was purified by preparative HPLC.

[0520] Table 16 shows a list of peptidomimetic macrocycles.

TABLE 16

| | SEQ | |
|---|---|---|
| SP- | ID NO: | Sequence |
| 1 | 1562 | Ac-F$4rn6AYWEAc3cL$4a5AAA-NH2 |
| 2 | 1563 | Ac-F$4rn6AYWEAc3cL$4a5AAibA-NH2 |
| 3 | 1564 | Ac-LTF$4rn6AYWAQL$4a5SANle-NH2 |
| 4 | 1565 | Ac-LTF$4rn6AYWAQL$4a5SAL-NH2 |
| 5 | 1566 | Ac-LTF$4rn6AYWAQL$4a5SAM-NH2 |
| 6 | 1567 | Ac-LTF$4rn6AYWAQL$4a5SAhL-NH2 |
| 7 | 1568 | Ac-LTF$4rn6AYWAQL$4a5SAF-NH2 |
| 8 | 1569 | Ac-LTF$4rn6AYWAQL$4a5SAI-NH2 |
| 9 | 1570 | Ac-LTF$4rn6AYWAQL$4a5SAChg-NH2 |
| 10 | 1571 | Ac-LTF$4rn6AYWAQL$4a5SAAib-NH2 |
| 11 | 1572 | Ac-LTF$4rn6AYWAQL$4a5SAA-NH2 |
| 12 | 1573 | Ac-LTF$4rn6AYWA$4a5L$S$Nle-NH2 |
| 13 | 1574 | Ac-LTF$4rn6AYWA$4a5L$S$A-NH2 |
| 14 | 1575 | Ac-F$4rn6AYWEAc3cL$4a5AANle-NH2 |
| 15 | 1576 | Ac-F$4rn6AYWEAc3cL$4a5AAL-NH2 |
| 16 | 1577 | Ac-F$4rn6AYWEAc3cL$4a5AAM-NH2 |
| 17 | 1578 | Ac-F$4rn6AYWEAc3cL$4a5AAhL-NH2 |
| 18 | 1579 | Ac-F$4rn6AYWEAc3cL$4a5AAF-NH2 |
| 19 | 1580 | Ac-F$4rn6AYWEAc3cL$4a5AAI-NH2 |
| 20 | 1581 | Ac-F$4rn6AYWEAc3cL$4a5AAChg-NH2 |
| 21 | 1582 | Ac-F$4rn6AYWEAc3cL$4a5AACha-NH2 |
| 22 | 1583 | Ac-F$4rn6AYWEAc3cL$4a5AAAib-NH2 |
| 23 | 1584 | Ac-LTF$4rn6AYWAQL$4a5AAAibV-NH2 |
| 24 | 1585 | Ac-LTF$4rn6AYWAQL$4a5AAAibV-NH2 |
| 25 | 1586 | Ac-LTF$4rn6AYWAQL$4a5SAibAA-NH2 |
| 26 | 1587 | Ac-LTF$4rn6AYWAQL$4a5SAibAA-NH2 |
| 27 | 1588 | Ac-HLTF$4rn6HHWHQL$4a5AANleNle-NH2 |
| 28 | 1589 | Ac-DLTF$4rn6HHWHQL$4a5RRLV-NH2 |
| 29 | 1590 | Ac-HHTF$4rn6HHWHQL$4a5AAML-NH2 |
| 30 | 1591 | Ac-F$4rn6HHWHQL$4a5RRDCha-NH2 |
| 31 | 1592 | Ac-F$4rn6HHWHQL$4a5HRFV-NH2 |
| 32 | 1593 | Ac-HLTF$4rn6HHWHQL$4a5AAhLA-NH2 |
| 33 | 1594 | Ac-DLTF$4rn6HHWHQL$4a5RRChgl-NH2 |
| 34 | 1595 | Ac-DLTF$4rn6HHWHQL$4a5RRChgl-NH2 |
| 35 | 1596 | Ac-HHTF$4rn6HHWHQL$4a5AAChav-NH2 |
| 36 | 1597 | Ac-F$4rn6HHWHQL$4a5RRDa-NH2 |
| 37 | 1598 | Ac-F$4rn6HHWHQL$4a5HRAibG-NH2 |
| 38 | 1599 | Ac-F$4rn6AYWAQL$4a5HHNleL-NH2 |
| 39 | 1600 | Ac-F$4rn6AYWSAL$4a5HQANle-NH2 |
| 40 | 1601 | Ac-F$4rn6AYWVQL$4a5QHChgl-NH2 |
| 41 | 1602 | Ac-F$4rn6AYWTAL$4a5QQNlev-NH2 |
| 42 | 1603 | Ac-F$4rn6AYWYQL$4a5HAibAa-NH2 |
| 43 | 1604 | Ac-LTF$4rn6AYWAQL$4a5HHLa-NH2 |
| 44 | 1605 | Ac-LTF$4rn6AYWAQL$4a5HHLa-NH2 |
| 45 | 1606 | Ac-LTF$4rn6AYWAQL$4a5HQNlev-NH2 |
| 46 | 1607 | Ac-LTF$4rn6AYWAQL$4a5HQNlev-NH2 |
| 47 | 1608 | Ac-LTF$4rn6AYWAQL$4a5QQMl-NH2 |
| 48 | 1609 | Ac-LTF$4rn6AYWAQL$4a5QQMl-NH2 |
| 49 | 1610 | Ac-LTF$4rn6AYWAQL$4a5HAibhLV-NH2 |
| 50 | 1611 | Ac-LTF$4rn6AYWAQL$4a5AHFA-NH2 |
| 51 | 1612 | Ac-HLTF$4rn6HHWHQL$4a5AANlel-NH2 |
| 52 | 1613 | Ac-DLTF$4rn6HHWHQL$4a5RRLa-NH2 |
| 53 | 1614 | Ac-HHTF$4rn6HHWHQL$4a5AAMv-NH2 |
| 54 | 1615 | Ac-F$4rn6HHWHQL$4a5RRDA-NH2 |
| 55 | 1616 | Ac-F$4rn6HHWHQL$4a5HRFCha-NH2 |
| 56 | 1617 | Ac-F$4rn6AYWEAL$4a5AA-NHAm |
| 57 | 1618 | Ac-F$4rn6AYWEAL$4a5AA-NHiAm |
| 58 | 1619 | Ac-F$4rn6AYWEAL$4a5AA-NHnPr3Ph |
| 59 | 1620 | Ac-F$4rn6AYWEAL$4a5AA-NHnBu33Me |
| 60 | 1621 | Ac-F$4rn6AYWEAL$4a5AA-NHnPr |
| 61 | 1622 | Ac-F$4rn6AYWEAL$4a5AA-NHnEt2Ch |
| 62 | 1623 | Ac-F$4rn6AYWEAL$4a5AA-NHnEt2Cp |
| 63 | 1624 | Ac-F$4rn6AYWEAL$4a5AA-NHHex |
| 64 | 1625 | Ac-LTF$4rn6AYWAQL$4a5AAIA-NH2 |
| 65 | 1626 | Ac-LTF$4rn6AYWAQL$4a5AAIA-NH2 |
| 66 | 1627 | Ac-LTF$4rn6AYWAAL$4a5AAMA-NH2 |
| 67 | 1628 | Ac-LTF$4rn6AYWAAL$4a5AAMA-NH2 |
| 68 | 1629 | Ac-LTF$4rn6AYWAQL$4a5AANleA-NH2 |
| 69 | 1630 | Ac-LTF$4rn6AYWAQL$4a5AANleA-NH2 |
| 70 | 1631 | Ac-LTF$4rn6AYWAQL$4a5AAIa-NH2 |
| 71 | 1632 | Ac-LTF$4rn6AYWAQL$4a5AAIa-NH2 |
| 72 | 1633 | Ac-LTF$4rn6AYWAAL$4a5AAMa-NH2 |
| 73 | 1634 | Ac-LTF$4rn6AYWAAL$4a5AAMa-NH2 |
| 74 | 1635 | Ac-LTF$4rn6AYWAQL$4a5AANlea-NH2 |
| 75 | 1636 | Ac-LTF$4rn6AYWAQL$4a5AANlea-NH2 |
| 76 | 1637 | Ac-LTF$4rn6AYWAAL$4a5AAIv-NH2 |
| 77 | 1638 | Ac-LTF$4rn6AYWAAL$4a5AAIv-NH2 |
| 78 | 1639 | Ac-LTF$4rn6AYWAQL$4a5AAMv-NH2 |
| 79 | 1640 | Ac-LTF$4rn6AYWAAL$4a5AANlev-NH2 |
| 80 | 1641 | Ac-LTF$4rn6AYWAAL$4a5AANlev-NH2 |
| 81 | 1642 | Ac-LTF$4rn6AYWAQL$4a5AAIl-NH2 |
| 82 | 1643 | Ac-LTF$4rn6AYWAQL$4a5AAIl-NH2 |
| 83 | 1644 | Ac-LTF$4rn6AYWAAL$4a5AAMl-NH2 |
| 84 | 1645 | Ac-LTF$4rn6AYWAQL$4a5AANlel-NH2 |
| 85 | 1646 | Ac-LTF$4rn6AYWAQL$4a5AANlel-NH2 |
| 86 | 1647 | Ac-F$4rn6AYWEAL$4a5AAMA-NH2 |
| 87 | 1648 | Ac-F$4rn6AYWEAL$4a5AANleA-NH2 |
| 88 | 1649 | Ac-F$4rn6AYWEAL$4a5AAIa-NH2 |
| 89 | 1650 | Ac-F$4rn6AYWEAL$4a5AAMa-NH2 |
| 90 | 1651 | Ac-F$4rn6AYWEAL$4a5AANlea-NH2 |
| 91 | 1652 | Ac-F$4rn6AYWEAL$4a5AAIv-NH2 |
| 92 | 1653 | Ac-F$4rn6AYWEAL$4a5AAMv-NH2 |
| 93 | 1654 | Ac-F$4rn6AYWEAL$4a5AANlev-NH2 |
| 94 | 1655 | Ac-F$4rn6AYWEAL$4a5AAIl-NH2 |
| 95 | 1656 | Ac-F$4rn6AYWEAL$4a5AAMl-NH2 |
| 96 | 1657 | Ac-F$4rn6AYWEAL$4a5AANlel-NH2 |
| 97 | 1658 | Ac-F$4rn6AYWEAL$4a5AANlel-NH2 |
| 98 | 1659 | Ac-LTF$4rn6AY6clWAQL$4a5SAA-NH2 |
| 99 | 1660 | Ac-LTF$4rn6AY6clWAQL$4a5SAA-NH2 |
| 100 | 1661 | Ac-WTF$4rn6FYWSQL$4a5AVAa-NH2 |
| 101 | 1662 | Ac-WTF$4rn6FYWSQL$4a5AVAa-NH2 |
| 102 | 1663 | Ac-WTF$4rn6VYWSQL$4a5AVA-NH2 |
| 103 | 1664 | Ac-WTF$4rn6VYWSQL$4a5AVA-NH2 |
| 104 | 1665 | Ac-WTF$4rn6FYWSQL$4a5SAAa-NH2 |
| 105 | 1666 | Ac-WTF$4rn6FYWSQL$4a5SAAa-NH2 |
| 106 | 1667 | Ac-WTF$4rn6VYWSQL$4a5AVAaa-NH2 |
| 107 | 1668 | Ac-WTF$4rn6VYWSQL$4a5AVAaa-NH2 |
| 108 | 1669 | Ac-LTF$4rn6AYWAQL$4a5AVG-NH2 |
| 109 | 1670 | Ac-LTF$4rn6AYWAQL$4a5AVG-NH2 |
| 110 | 1671 | Ac-LTF$4rn6AYWAQL$4a5AVQ-NH2 |
| 111 | 1672 | Ac-LTF$4rn6AYWAQL$4a5AVQ-NH2 |
| 112 | 1673 | Ac-LTF$4rn6AYWAQL$4a5SAa-NH2 |
| 113 | 1674 | Ac-LTF$4rn6AYWAQL$4a5SAa-NH2 |
| 114 | 1675 | Ac-LTF$4rn6AYWAQhL$4a5SAA-NH2 |
| 115 | 1676 | Ac-LTF$4rn6AYWAQhL$4a5SAA-NH2 |
| 116 | 1677 | Ac-LTF$4rn6AYWEQLStSA$4a5-NH2 |
| 117 | 1678 | Ac-LTF$4rn6AYWAQL$4a5SLA-NH2 |
| 118 | 1679 | Ac-LTF$4rn6AYWAQL$4a5SLA-NH2 |
| 119 | 1680 | Ac-LTF$4rn6AYWAQL$4a5SWA-NH2 |
| 120 | 1681 | Ac-LTF$4rn6AYWAQL$4a5SWA-NH2 |
| 121 | 1682 | Ac-LTF$4rn6AYWAQL$4a5SVS-NH2 |
| 122 | 1683 | Ac-LTF$4rn6AYWAQL$4a5SAS-NH2 |
| 123 | 1684 | Ac-LTF$4rn6AYWAQL$4a5SVG-NH2 |
| 124 | 1685 | Ac-ETF$4rn6VYWAQL$4a5SAa-NH2 |
| 125 | 1686 | Ac-ETF$4rn6VYWAQL$4a5SAA-NH2 |
| 126 | 1687 | Ac-ETF$4rn6VYWAQL$4a5SVA-NH2 |
| 127 | 1688 | Ac-ETF$4rn6VYWAQL$4a5SLA-NH2 |
| 128 | 1689 | Ac-ETF$4rn6VYWAQL$4a5SWA-NH2 |
| 129 | 1690 | Ac-ETF$4rn6KYWAQL$4a5SWA-NH2 |
| 130 | 1691 | Ac-ETF$4rn6VYWAQL$4a5SVS-NH2 |
| 131 | 1692 | Ac-ETF$4rn6VYWAQL$4a5SAS-NH2 |
| 132 | 1693 | Ac-ETF$4rn6VYWAQL$4a5SVG-NH2 |
| 133 | 1694 | Ac-LTF$4rn6VYWAQL$4a5SSa-NH2 |
| 134 | 1695 | Ac-ETF$4rn6VYWAQL$4a5SSa-NH2 |
| 135 | 1696 | Ac-LTF$4rn6VYWAQL$4a5SNa-NH2 |
| 136 | 1697 | Ac-ETF$4rn6VYWAQL$4a5SNa-NH2 |
| 137 | 1698 | Ac-LTF$4rn6VYWAQL$4a5SAa-NH2 |
| 138 | 1699 | Ac-LTF$4rn6VYWAQL$4a5SVA-NH2 |
| 139 | 1700 | Ac-LTF$4rn6VYWAQL$4a5SVA-NH2 |
| 140 | 1701 | Ac-LTF$4rn6VYWAQL$4a5SWA-NH2 |
| 141 | 1702 | Ac-LTF$4rn6VYWAQL$4a5SVS-NH2 |
| 142 | 1703 | Ac-LTF$4rn6VYWAQL$4a5SVS-NH2 |
| 143 | 1704 | Ac-LTF$4rn6VYWAQL$4a5SAS-NH2 |
| 144 | 1705 | Ac-LTF$4rn6VYWAQL$4a5SAS-NH2 |
| 145 | 1706 | Ac-LTF$4rn6VYWAQL$4a5SVG-NH2 |
| 146 | 1707 | Ac-LTF$4rn6VYWAQL$4a5SVG-NH2 |
| 147 | 1708 | Ac-LTF$4rn6EYWAQCha$4a5SAA-NH2 |
| 148 | 1709 | Ac-LTF$4rn6EYWAQCha$4a5SAA-NH2 |
| 149 | 1710 | Ac-LTF$4rn6EYWAQCpg$4a5SAA-NH2 |
| 150 | 1711 | Ac-LTF$4rn6EYWAQCpg$4a5SAA-NH2 |
| 151 | 1712 | Ac-LTF$4rn6EYWAQF$4a5SAA-NH2 |
| 152 | 1713 | Ac-LTF$4rn6EYWAQF$4a5SAA-NH2 |
| 153 | 1714 | Ac-LTF$4rn6EYWAQCba$4a5SAA-NH2 |
| 154 | 1715 | Ac-LTF$4rn6EYWAQCba$4a5SAA-NH2 |
| 155 | 1716 | Ac-LTF3Cl$4rn6EYWAQL$4a5SAA-NH2 |
| 156 | 1717 | Ac-LTF3Cl$4rn6EYWAQL$4a5SAA-NH2 |
| 157 | 1718 | Ac-LTF34F2$4rn6EYWAQL$4a5SAA-NH2 |
| 158 | 1719 | Ac-LTF34F2$4rn6EYWAQL$4a5SAA-NH2 |
| 159 | 1720 | Ac-LTF34F2$4rn6EYWAQhL$4a5SAA-NH2 |
| 160 | 1721 | Ac-LTF34F2$4rn6EYWAQhL$4a5SAA-NH2 |
| 161 | 1722 | Ac-ETF$4rn6EYWAQL$4a5SAA-NH2 |
| 162 | 1723 | Ac-LTF$4rn6AYWVQL$4a5SAA-NH2 |
| 163 | 1724 | Ac-LTF$4rn6AHWAQL$4a5SAA-NH2 |
| 164 | 1725 | Ac-LTF$4rn6AEWAQL$4a5SAA-NH2 |
| 165 | 1726 | Ac-LTF$4rn6ASWAQL$4a5SAA-NH2 |
| 166 | 1727 | Ac-LTF$4rn6AEWAQL$4a5SAA-NH2 |
| 167 | 1728 | Ac-LTF$4rn6ASWAQL$4a5SAA-NH2 |
| 168 | 1729 | Ac-LTF$4rn6AF4coohWAQL$4a5SAA-NH2 |
| 169 | 1730 | Ac-LTF$4rn6AF4coohWAQL$4a5SAA-NH2 |
| 170 | 1731 | Ac-LTF$4rn6AHWAQL$4a5AAIa-NH2 |
| 171 | 1732 | Ac-ITF$4rn6FYWAQL$4a5AAIa-NH2 |
| 172 | 1733 | Ac-ITF$4rn6EHWAQL$4a5AAIa-NH2 |
| 173 | 1734 | Ac-ITF$4rn6EHWAQL$4a5AAIa-NH2 |
| 174 | 1735 | Ac-ETF$4rn6EHWAQL$4a5AAIa-NH2 |
| 175 | 1736 | Ac-ETF$4rn6EHWAQL$4a5AAIa-NH2 |
| 176 | 1737 | Ac-LTF$4rn6AHWVQL$4a5AAIa-NH2 |
| 177 | 1738 | Ac-ITF$4rn6FYWVQL$4a5AAIa-NH2 |
| 178 | 1739 | Ac-ITF$4rn6EYWVQL$4a5AAIa-NH2 |
| 179 | 1740 | Ac-ITF$4rn6EHWVQL$4a5AAIa-NH2 |
| 180 | 1741 | Ac-LTF$4rn6AEWAQL$4a5AAIa-NH2 |
| 181 | 1742 | Ac-LTF$4rn6AF4coohWAQL$4a5AAIa-NH2 |
| 182 | 1743 | Ac-LTF$4rn6AF4coohWAQL$4a5AAIa-NH2 |
| 183 | 1744 | Ac-LTF$4rn6AHWAQL$4a5AHFA-NH2 |
| 184 | 1745 | Ac-ITF$4rn6FYWAQL$4a5AHFA-NH2 |
| 185 | 1746 | Ac-ITF$4rn6FYWAQL$4a5AHFA-NH2 |
| 186 | 1747 | Ac-ITF$4rn6FHWAQL$4a5AEFA-NH2 |
| 187 | 1748 | Ac-ITF$4rn6FHWAQL$4a5AEFA-NH2 |
| 188 | 1749 | Ac-ITF$4rn6EHWAQL$4a5AHFA-NH2 |
| 189 | 1750 | Ac-ITF$4rn6EHWAQL$4a5AHFA-NH2 |
| 190 | 1751 | Ac-LTF$4rn6AHWVQL$4a5AHFA-NH2 |
| 191 | 1752 | Ac-ITF$4rn6FYWVQL$4a5AHFA-NH2 |
| 192 | 1753 | Ac-ITF$4rn6EYWVQL$4a5AHFA-NH2 |
| 193 | 1754 | Ac-ITF$4rn6EHWVQL$4a5AHFA-NH2 |
| 194 | 1755 | Ac-ITF$4rn6EHWVQL$4a5AHFA-NH2 |
| 195 | 1756 | Ac-ETF$4rn6EYWAAL$4a5SAA-NH2 |
| 196 | 1757 | Ac-LTF$4rn6AYWVAL$4a5SAA-NH2 |
| 197 | 1758 | Ac-LTF$4rn6AHWAAL$4a5SAA-NH2 |
| 198 | 1759 | Ac-LTF$4rn6AEWAAL$4a5SAA-NH2 |
| 199 | 1760 | Ac-LTF$4rn6AEWAAL$4a5SAA-NH2 |
| 200 | 1761 | Ac-LTF$4rn6ASWAAL$4a5SAA-NH2 |
| 201 | 1762 | Ac-LTF$4rn6ASWAAL$4a5SAA-NH2 |
| 202 | 1763 | Ac-LTF$4rn6AYWAAL$4a5AAIa-NH2 |
| 203 | 1764 | Ac-LTF$4rn6AYWAAL$4a5AAIa-NH2 |
| 204 | 1765 | Ac-LTF$4rn6AYWAAL$4a5AHFA-NH2 |
| 205 | 1766 | Ac-LTF$4rn6EHWAQL$4a5AHIa-NH2 |
| 206 | 1767 | Ac-LTF$4rn6EHWAQL$4a5AHIa-NH2 |
| 207 | 1768 | Ac-LTF$4rn6AHWAQL$4a5AHIa-NH2 |
| 208 | 1769 | Ac-LTF$4rn6EYWAQL$4a5AHIa-NH2 |
| 209 | 1770 | Ac-LTF$4rn6AYWAQL$4a5AAFa-NH2 |
| 210 | 1771 | Ac-LTF$4rn6AYWAQL$4a5AAFa-NH2 |
| 211 | 1772 | Ac-LTF$4rn6AYWAQL$4a5AAWa-NH2 |
| 212 | 1773 | Ac-LTF$4rn6AYWAQL$4a5AAVa-NH2 |
| 213 | 1774 | Ac-LTF$4rn6AYWAQL$4a5AAVa-NH2 |
| 214 | 1775 | Ac-LTF$4rn6AYWAQL$4a5AALa-NH2 |
| 215 | 1776 | Ac-LTF$4rn6AYWAQL$4a5AALa-NH2 |
| 216 | 1777 | Ac-LTF$4rn6EYWAQL$4a5AAIa-NH2 |
| 217 | 1778 | Ac-LTF$4rn6EYWAQL$4a5AAIa-NH2 |
| 218 | 1779 | Ac-LTF$4rn6EYWAQL$4a5AAFa-NH2 |
| 219 | 1780 | Ac-LTF$4rn6EYWAQL$4a5AAFa-NH2 |
| 220 | 1781 | Ac-LTF$4rn6EYWAQL$4a5AAVa-NH2 |
| 221 | 1782 | Ac-LTF$4rn6EYWAQL$4a5AAVa-NH2 |
| 222 | 1783 | Ac-LTF$4rn6EHWAQL$4a5AAIa-NH2 |
| 223 | 1784 | Ac-LTF$4rn6EHWAQL$4a5AAIa-NH2 |
| 224 | 1785 | Ac-LTF$4rn6EHWAQL$4a5AAWa-NH2 |
| 225 | 1786 | Ac-LTF$4rn6EHWAQL$4a5AAWa-NH2 |
| 226 | 1787 | Ac-LTF$4rn6EHWAQL$4a5AALa-NH2 |
| 227 | 1788 | Ac-LTF$4rn6EHWAQL$4a5AALa-NH2 |
| 228 | 1789 | Ac-ETF$4rn6EHWVQL$4a5AALa-NH2 |
| 229 | 1790 | Ac-LTF$4rn6AYWAQL$4a5AAAa-NH2 |
| 230 | 1791 | Ac-LTF$4rn6AYWAQL$4a5AAAa-NH2 |
| 231 | 1792 | Ac-LTF$4rn6AYWAQL$4a5AAAibA-NH2 |
| 232 | 1793 | Ac-LTF$4rn6AYWAQL$4a5AAAibA-NH2 |
| 233 | 1794 | Ac-LTF$4rn6AYWAQL$4a5AAAAa-NH2 |
| 234 | 1795 | Ac-LTF$r5AYWAQL$4a5s8AAIa-NH2 |
| 235 | 1796 | Ac-LTF$r5AYWAQL$4a5s8SAA-NH2 |
| 236 | 1797 | Ac-LTF$4rn6AYWAQCba$4a5AANleA-NH2 |
| 237 | 1798 | Ac-ETF$4rn6AYWAQCba$4a5AANleA-NH2 |
| 238 | 1799 | Ac-LTF$4rn6EYWAQCba$4a5AANleA-NH2 |
| 239 | 1800 | Ac-LTF$4rn6AYWAQCba$4a5AWNleA-NH2 |
| 240 | 1801 | Ac-ETF$4rn6AYWAQCba$4a5AWNleA-NH2 |
| 241 | 1802 | Ac-LTF$4rn6EYWAQCba$4a5AWNleA-NH2 |
| 242 | 1803 | Ac-LTF$4rn6EYWAQCba$4a5SAFA-NH2 |
| 243 | 1804 | Ac-LTF34F2$4rn6EYWAQCba$4a5SANleA-NH2 |
| 244 | 1805 | Ac-LTF$4rn6EF4coohWAQCba$4a5SANleA-NH2 |
| 245 | 1806 | Ac-LTF$4rn6EYWSQCba$4a5SANleA-NH2 |
| 246 | 1807 | Ac-LTF$4rn6EYWWQCba$4a5SANleA-NH2 |
| 247 | 1808 | Ac-LTF$4rn6EYWAQCba$4a5AAIa-NH2 |
| 248 | 1809 | Ac-LTF34F2$4rn6EYWAQCba$4a5AAIa-NH2 |
| 249 | 1810 | Ac-LTF$4rn6EF4coohWAQCba$4a5AAIa-NH2 |
| 250 | 1811 | Pam-ETF$4rn6EYWAQCba$4a5SAA-NH2 |
| 251 | 1812 | Ac-LThF$4rn6EFWAQCba$4a5SAA-NH2 |
| 252 | 1813 | Ac-LTA$4rn6EYWAQCba$4a5SAA-NH2 |
| 253 | 1814 | Ac-LTF$4rn6EYAAQCba$4a5SAA-NH2 |
| 254 | 1815 | Ac-LTF$4rn6EY2NalAQCba$4a5SAA-NH2 |
| 255 | 1816 | Ac-LTF$4rn6AYWAQCba$4a5SAA-NH2 |
| 256 | 1817 | Ac-LTF$4rn6EYWAQCba$4a5SAF-NH2 |
| 257 | 1818 | Ac-LTF$4rn6EYWAQCba$4a5SAFa-NH2 |
| 258 | 1819 | Ac-LTF$4rn6AYWAQCba$4a5SAF-NH2 |
| 259 | 1820 | Ac-LTF34F2$4rn6AYWAQCba$4a5SAF-NH2 |
| 260 | 1821 | Ac-LTF$4rn6AF4coohWAQCba$4a5SAF-NH2 |
| 261 | 1822 | Ac-LTF$4rn6EY6clWAQCba$4a5SAF-NH2 |
| 262 | 1823 | Ac-LTF$4rn6AYWSQCba$4a5SAF-NH2 |
| 263 | 1824 | Ac-LTF$4rn6AYWWQCba$4a5SAF-NH2 |
| 264 | 1825 | Ac-LTF$4rn6AYWAQCba$4a5AAIa-NH2 |
| 265 | 1826 | Ac-LTF34F2$4rn6AYWAQCba$4a5AAIa-NH2 |
| 266 | 1827 | Ac-LTF$4rn6AY6clWAQCba$4a5AAIa-NH2 |
| 267 | 1828 | Ac-LTF$4rn6AF4coohWAQCba$4a5AAIa-NH2 |
| 268 | 1829 | Ac-LTF$4rn6EYWAQCba$4a5AAFa-NH2 |
| 269 | 1830 | Ac-LTF$4rn6EYWAQCba$4a5AAFa-NH2 |
| 270 | 1831 | Ac-ETF$4rn6AYWAQCba$4a5AWNlea-NH2 |
| 271 | 1832 | Ac-LTF$4rn6EYWAQCba$4a5AWNlea-NH2 |
| 272 | 1833 | Ac-ETF$4rn6EYWAQCba$4a5AWNlea-NH2 |
| 273 | 1834 | Ac-ETF$4rn6EYWAQCba$4a5AWNlea-NH2 |
| 274 | 1835 | Ac-LTF$4rn6AYWAQCba$4a5SAFa-NH2 |
| 275 | 1836 | Ac-LTF$4rn6AYWAQCba$4a5SAFa-NH2 |
| 276 | 1837 | Ac-ETF$4rn6AYWAQL$4a5AWNlea-NH2 |
| 277 | 1838 | Ac-LTF$4rn6EYWAQL$4a5AWNlea-NH2 |
| 278 | 1839 | Ac-ETF$4rn6EYWAQL$4a5AWNlea-NH2 |
| 279 | 1840 | Dmaac-LTF$4rn6EYWAQhL$4a5SAA-NH2 |
| 280 | 1841 | Hexac-LTF$4rn6EYWAQhL$4a5SAA-NH2 |
| 281 | 1842 | Napac-LTF$4rn6EYWAQhL$4a5SAA-NH2 |
| 282 | 1843 | Decac-LTF$4rn6EYWAQhL$4a5SAA-NH2 |
| 283 | 1844 | Admac-LTF$4rn6EYWAQhL$4a5SAA-NH2 |
| 284 | 1845 | Tmac-LTF$4rn6EYWAQhL$4a5SAA-NH2 |
| 285 | 1846 | Pam-LTF$4rn6EYWAQhL$4a5SAA-NH2 |
| 286 | 1847 | Ac-LTF$4rn6AYWAQCba$4a5AANleA-NH2 |
| 287 | 1848 | Ac-LTF34F2$4rn6EYWAQCba$4a5AAIa-NH2 |
| 288 | 1849 | Ac-LTF34F2$4rn6EYWAQCba$4a5SAA-NH2 |
| 289 | 1850 | Ac-LTF34F2$4rn6EYWAQCba$4a5SAA-NH2 |
| 290 | 1851 | Ac-LTF$4rn6EF4coohWAQCba$4a5SAA-NH2 |
| 291 | 1852 | Ac-LTF$4rn6EF4coohWAQCba$4a5SAA-NH2 |
| 292 | 1853 | Ac-LTF$4rn6EYWSQCba$4a5SAA-NH2 |
| 293 | 1854 | Ac-LTF$4rn6EYWSQCba$4a5SAA-NH2 |
| 294 | 1855 | Ac-LTF$4rn6EYWAQhL$4a5SAA-NH2 |
| 295 | 1856 | Ac-LTF$4rn6AYWAQhL$4a5SAF-NH2 |
| 296 | 1857 | Ac-LTF$4rn6AYWAQhL$4a5SAF-NH2 |
| 297 | 1858 | Ac-LTF34F2$4rn6AYWAQhL$4a5SAA-NH2 |
| 298 | 1859 | Ac-LTF34F2$4rn6AYWAQhL$4a5SAA-NH2 |
| 299 | 1860 | Ac-LTF$4rn6AF4coohWAQhL$4a5SAA-NH2 |
| 300 | 1861 | Ac-LTF$4rn6AF4coohWAQhL$4a5SAA-NH2 |
| 301 | 1862 | Ac-LTF$4rn6AYWSQhL$4a5SAA-NH2 |
| 302 | 1863 | Ac-LTF$4rn6AYWSQhL$4a5SAA-NH2 |
| 303 | 1864 | Ac-LTF$4rn6EYWAQL$4a5AANleA-NH2 |
| 304 | 1865 | Ac-LTF34F2$4rn6AYWAQL$4a5AANleA-NH2 |
| 305 | 1866 | Ac-LTF$4rn6AF4coohWAQL$4a5AANleA-NH2 |
| 306 | 1867 | Ac-LTF$4rn6AYWSQL$4a5AANleA-NH2 |
| 307 | 1868 | Ac-LTF34F2$4rn6AYWAQhL$4a5AANleA-NH2 |
| 308 | 1869 | Ac-LTF34F2$4rn6AYWAQhL$4a5AANleA-NH2 |
| 309 | 1870 | Ac-LTF$4rn6AF4coohWAQhL$4a5AANleA-NH2 |
| 310 | 1871 | Ac-LTF$4rn6AF4coohWAQhL$4a5AANleA-NH2 |
| 311 | 1872 | Ac-LTF$4rn6AYWSQhL$4a5AANleA-NH2 |
| 312 | 1873 | Ac-LTF$4rn6AYWSQhL$4a5AANleA-NH2 |
| 313 | 1874 | Ac-LTF$4rn6AYWAQhL$4a5AAAAa-NH2 |
| 314 | 1875 | Ac-LTF$4rn6AYWAQhL$4a5AAAAa-NH2 |
| 315 | 1876 | Ac-LTF$4rn6AYWAQL$4a5AAAAAa-NH2 |
| 316 | 1877 | Ac-LTF$4rn6AYWAQL$4a5AAAAAAa-NH2 |
| 317 | 1878 | Ac-LTF$4rn6AYWAQL$4a5AAAAAAa-NH2 |
| 318 | 1879 | Ac-LTF$4rn6EYWAQhL$4a5AANleA-NH2 |
| 319 | 1880 | Ac-AATF$4rn6AYWAQL$4a5AANleA-NH2 |
| 320 | 1881 | Ac-LTF$4rn6AYWAQL$4a5AANleAA-NH2 |
| 321 | 1882 | Ac-ALTF$4rn6AYWAQL$4a5AANleAA-NH2 |
| 322 | 1883 | Ac-LTF$4rn6AYWAQCba$4a5AANleAA-NH2 |
| 323 | 1884 | Ac-LTF$4rn6AYWAQhL$4a5AANleAA-NH2 |
| 324 | 1885 | Ac-LTF$4rn6EYWAQCba$4a5SAAA-NH2 |
| 325 | 1886 | Ac-LTF$4rn6EYWAQCba$4a5SAAA-NH2 |
| 326 | 1887 | Ac-LTF$4rn6EYWAQCba$4a5SAAAA-NH2 |
| 327 | 1888 | Ac-LTF$4rn6EYWAQCba$4a5SAAAA-NH2 |
| 328 | 1889 | Ac-ALTF$4rn6EYWAQCba$4a5SAA-NH2 |
| 329 | 1890 | Ac-ALTF$4rn6EYWAQCba$4a5SAAA-NH2 |
| 330 | 1891 | Ac-ALTF$4rn6EYWAQCba$4a5SAA-NH2 |
| 331 | 1892 | Ac-LTF$4rn6EYWAQL$4a5AAAAAa-NH2 |
| 332 | 1893 | Ac-LTF$4rn6EY6clWAQCba$4a5SAA-NH2 |
| 333 | 1894 | Ac-LTF$4rn6EF4cooh6clWAQCba$4a5SANleA-NH2 |
| 334 | 1895 | Ac-LTF$4rn6EF4cooh6clWAQCba$4a5SANleA-NH2 |
| 335 | 1896 | Ac-LTF$4rn6EF4cooh6clWAQCba$4a5AAIa-NH2 |
| 336 | 1897 | Ac-LTF$4rn6EF4cooh6clWAQCba$4a5AAIa-NH2 |
| 337 | 1898 | Ac-LTF$4rn6AY6clWAQL$4a5AAAAAa-NH2 |
| 338 | 1899 | Ac-LTF$4rn6AY6clWAQL$4a5AAAAAa-NH2 |
| 339 | 1900 | Ac-F$4rn6AY6clWEAL$4a5AAAAAAa-NH2 |
| 340 | 1901 | Ac-ETF$4rn6EYWAQL$4a5AAAAAa-NH2 |
| 341 | 1902 | Ac-ETF$4rn6EYWAQL$4a5AAAAAa-NH2 |
| 342 | 1903 | Ac-LTF$4rn6EYWAQL$4a5AAAAAAa-NH2 |
| 343 | 1904 | Ac-LTF$4rn6EYWAQL$4a5AAAAAAa-NH2 |
| 344 | 1905 | Ac-LTF$4rn6AYWAQL$4a5AANleAAa-NH2 |
| 345 | 1906 | Ac-LTF$4rn6AYWAQL$4a5AANleAAa-NH2 |
| 346 | 1907 | Ac-LTF$4rn6EYWAQCba$4a5AAAAAa-NH2 |
| 347 | 1908 | Ac-LTF$4rn6EYWAQCba$4a5AAAAAa-NH2 |
| 348 | 1909 | Ac-LTF$4rn6EF4coohWAQCba$4a5AAAAAa-NH2 |
| 349 | 1910 | Ac-LTF$4rn6EF4coohWAQCba$4a5AAAAAa-NH2 |
| 350 | 1911 | Ac-LTF$4rn6EYWSQCba$4a5AAAAAa-NH2 |
| 351 | 1912 | Ac-LTF$4rn6EYWSQCba$4a5AAAAAa-NH2 |
| 352 | 1913 | Ac-LTF$4rn6EYWAQCba$4a5SAAa-NH2 |
| 353 | 1914 | Ac-LTF$4rn6EYWAQCba$4a5SAAa-NH2 |
| 354 | 1915 | Ac-ALTF$4rn6EYWAQCba$4a5SAAa-NH2 |
| 355 | 1916 | Ac-ALTF$4rn6EYWAQCba$4a5SAAa-NH2 |
| 356 | 1917 | Ac-ALTF$4rn6EYWAQCba$4a5SAAAa-NH2 |
| 357 | 1918 | Ac-ALTF$4rn6EYWAQCba$4a5SAAAa-NH2 |
| 358 | 1919 | Ac-AALTF$4rn6EYWAQCba$4a5SAAAa-NH2 |
| 359 | 1920 | Ac-AALTF$4rn6EYWAQCba$4a5SAAAa-NH2 |
| 360 | 1921 | Ac-RTF$4rn6EYWAQCba$4a5SAA-NH2 |
| 361 | 1922 | Ac-LRF$4rn6EYWAQCba$4a5SAA-NH2 |
| 362 | 1923 | Ac-LTF$4rn6EYWRQCba$4a5SAA-NH2 |
| 363 | 1924 | Ac-LTF$4rn6EYWARCba$4a5SAA-NH2 |
| 364 | 1925 | Ac-LTF$4rn6EYWAQCba$4a5RAA-NH2 |
| 365 | 1926 | Ac-LTF$4rn6EYWAQCba$4a5SRA-NH2 |
| 366 | 1927 | Ac-LTF$4rn6EYWAQCba$4a5SAR-NH2 |
| 367 | 1928 | 5-FAM-BaLTF$4rn6EYWAQCba$4a5SAA-NH2 |
| 368 | 1929 | 5-FAM-BaLTF$4rn6AYWAQL$4a5AANleA-NH2 |
| 369 | 1930 | Ac-LAF$4rn6EYWAQL$4a5AANleA-NH2 |
| 370 | 1931 | Ac-ATF$4rn6EYWAQL$4a5AANleA-NH2 |
| 371 | 1932 | Ac-AAF$4rn6EYWAQL$4a5AANleA-NH2 |
| 372 | 1933 | Ac-AAAF$4rn6EYWAQL$4a5AANleA-NH2 |
| 373 | 1934 | Ac-AAAAF$4rn6EYWAQL$4a5AANleA-NH2 |
| 374 | 1935 | Ac-AATF$4rn6EYWAQL$4a5AANleA-NH2 |
| 375 | 1936 | Ac-AALTF$4rn6EYWAQL$4a5AANleA-NH2 |
| 376 | 1937 | Ac-AAALTF$4rn6EYWAQL$4a5AANleA-NH2 |
| 377 | 1938 | Ac-LTF$4rn6EYWAQL$4a5AANleAA-NH2 |
| 378 | 1939 | Ac-ALTF$4rn6EYWAQL$4a5AANleAA-NH2 |
| 379 | 1940 | Ac-AALTF$4rn6EYWAQL$4a5AANleAA-NH2 |
| 380 | 1941 | Ac-LTF$4rn6EYWAQCba$4a5AANleAA-NH2 |
| 381 | 1942 | Ac-LTF$4rn6EYWAQhL$4a5AANleAA-NH2 |
| 382 | 1943 | Ac-ALTF$4rn6EYWAQhL$4a5AANleAA-NH2 |
| 383 | 1944 | Ac-LTF$4rn6ANmYWAQL$4a5AANleA-NH2 |
| 384 | 1945 | Ac-LTF$4rn6ANmYWAQL$4a5AANleA-NH2 |
| 385 | 1946 | Ac-LTF$4rn6AYNmWAQL$4a5AANleA-NH2 |
| 386 | 1947 | Ac-LTF$4rn6AYNmWAQL$4a5AANleA-NH2 |
| 387 | 1948 | Ac-LTF$4rn6AYAmwAQL$4a5AANleA-NH2 |
| 388 | 1949 | Ac-LTF$4rn6AYAmwAQL$4a5AANleA-NH2 |
| 389 | 1950 | Ac-LTF$4rn6AYWAibQL$4a5AANleA-NH2 |
| 390 | 1951 | Ac-LTF$4rn6AYWAibQL$4a5AANleA-NH2 |
| 391 | 1952 | Ac-LTF$4rn6AYWAQL$4a5AAibNleA-NH2 |
| 392 | 1953 | Ac-LTF$4rn6AYWAQL$4a5AAibNleA-NH2 |
| 393 | 1954 | Ac-LTF$4rn6AYWAQL$4a5AaNleA-NH2 |
| 394 | 1955 | Ac-LTF$4rn6AYWAQL$4a5AaNleA-NH2 |
| 395 | 1956 | Ac-LTF$4rn6AYWAQL$4a5ASarNleA-NH2 |
| 396 | 1957 | Ac-LTF$4rn6AYWAQL$4a5ASarNleA-NH2 |
| 397 | 1958 | Ac-LTF$4rn6AYWAQL$4a5AANleAib-NH2 |
| 398 | 1959 | Ac-LTF$4rn6AYWAQL$4a5AANleAib-NH2 |
| 399 | 1960 | Ac-LTF$4rn6AYWAQL$4a5AANleNmA-NH2 |
| 400 | 1961 | Ac-LTF$4rn6AYWAQL$4a5AANleNmA-NH2 |
| 401 | 1962 | Ac-LTF$4rn6AYWAQL$4a5AANleSar-NH2 |
| 402 | 1963 | Ac-LTF$4rn6AYWAQL$4a5AANleSar-NH2 |
| 403 | 1964 | Ac-LTF$4rn6AYWAQL$4a5AANleAAib-NH2 |
| 404 | 1965 | Ac-LTF$4rn6AYWAQL$4a5AANleAAib-NH2 |
| 405 | 1966 | Ac-LTF$4rn6AYWAQL$4a5AANleANmA-NH2 |
| 406 | 1967 | Ac-LTF$4rn6AYWAQL$4a5AANleANmA-NH2 |
| 407 | 1968 | Ac-LTF$4rn6AYWAQL$4a5AANleAa-NH2 |
| 408 | 1969 | Ac-LTF$4rn6AYWAQL$4a5AANleAa-NH2 |
| 409 | 1970 | Ac-LTF$4rn6AYWAQL$4a5AANleASar-NH2 |
| 410 | 1971 | Ac-LTF$4rn6AYWAQL$4a5AANleASar-NH2 |
| 413 | 1972 | Ac-LTF$4rn6Cou4YWAQL$4a5AANleA-NH2 |
| 414 | 1973 | Ac-LTF$4rn6Cou4YWAQL$4a5AANleA-NH2 |
| 415 | 1974 | Ac-LTF$4rn6AYWCou4QL$4a5AANleA-NH2 |
| 416 | 1975 | Ac-LTF$4rn6AYWAQL$4a5Cou4ANleA-NH2 |
| 417 | 1976 | Ac-LTF$4rn6AYWAQL$4a5Cou4ANleA-NH2 |
| 418 | 1977 | Ac-LTF$4rn6AYWAQL$4a5ACou4NleA-NH2 |
| 419 | 1978 | Ac-LTF$4rn6AYWAQL$4a5ACou4NleA-NH2 |
| 420 | 1979 | Ac-LTF$4rn6AYWAQL$4a5AANleA-OH |
| 421 | 1980 | Ac-LTF$4rn6AYWAQL$4a5AANleA-OH |
| 422 | 1981 | Ac-LTF$4rn6AYWAQL$4a5AANleA-NHnPr |
| 423 | 1982 | Ac-LTF$4rn6AYWAQL$4a5AANleA-NHnPr |
| 424 | 1983 | Ac-LTF$4rn6AYWAQL$4a5AANleA-NHnBu33Me |
| 425 | 1984 | Ac-LTF$4rn6AYWAQL$4a5AANleA-NHnBu33Me |
| 426 | 1985 | Ac-LTF$4rn6AYWAQL$4a5AANleA-NHHex |
| 427 | 1986 | Ac-LTF$4rn6AYWAQL$4a5AANleA-NHHex |
| 428 | 1987 | Ac-LTA$4rn6AYWAQL$4a5AANleA-NH2 |
| 429 | 1988 | Ac-LThL$4rn6AYWAQL$4a5AANleA-NH2 |
| 430 | 1989 | Ac-LTF$4rn6AYAAQL$4a5AANleA-NH2 |
| 431 | 1990 | Ac-LTF$4rn6AY2NalAQL$4a5AANleA-NH2 |
| 432 | 1991 | Ac-LTF$4rn6EYWCou4QCba$4a5SAA-NH2 |
| 433 | 1992 | Ac-LTF$4rn6EYWCou7QCba$4a5SAA-NH2 |
| 435 | 1993 | Dmaac-LTF$4rn6EYWAQCba$4a5SAA-NH2 |
| 436 | 1994 | Dmaac-LTF$4rn6AYWAQL$4a5AAAAAa-NH2 |
| 437 | 1995 | Dmaac-LTF$4rn6AYWAQL$4a5AAAAAa-NH2 |
| 438 | 1996 | Dmaac-LTF$4rn6EYWAQL$4a5AAAAAa-NH2 |
| 439 | 1997 | Dmaac-LTF$4rn6EYWAQL$4a5AAAAAa-NH2 |
| 440 | 1998 | Dmaac-LTF$4rn6EF4coohWAQCba$4a5AAIa-NH2 |
| 441 | 1999 | Dmaac-LTF$4rn6EF4coohWAQCba$4a5AAIa-NH2 |
| 442 | 2000 | Dmaac-LTF$4rn6AYWAQL$4a5AANleA-NH2 |
| 443 | 2001 | Dmaac-LTF$4rn6AYWAQL$4a5AANleA-NH2 |
| 444 | 2002 | Ac-LTF$4rn6AYWAQL$4a5AANleA-NH2 |
| 445 | 2003 | Ac-LTF$4rn6EYWAQL$4a5AAAAAa-NH2 |
| 446 | 2004 | Cou6BaLTF$4rn6EYWAQhL$4a5SAA-NH2 |
| 447 | 2005 | Cou8BaLTF$4rn6EYWAQhL$4a5SAA-NH2 |
| 448 | 2006 | Ac-LTF4I$4rn6EYWAQL$4a5AAAAAa-NH2 |

TABLE 17

| | SEQ | | Exact | Found | Calc | Calc | Calc |
|---|---|---|---|---|---|---|---|
| SP | ID NO: | Sequence | Mass | Mass | (M + 1)/1 | (M + 2)/2 | (M + 3)/3 |
| 449 | 2007 | Ac-LTF$4rn6AYWAQL$4a5AANleA-NH2 | 1812.01 | 907.89 | 1813.02 | 907.01 | 605.01 |
| 450 | 2008 | Ac-LTF$4rn6AYWAQL$4a5AAAAAa-NH2 | 1912.04 | 957.75 | 1913.05 | 957.03 | 638.35 |
| 451 | 2009 | Ac-LTF$4rn6EYWAQL$4a5AAAAAa-NH2 | 1970.04 | 986.43 | 1971.05 | 986.03 | 657.69 |
| 452 | 2010 | Ac-LTF$5rn6AYWAQL$5a5AAAAAa-NH2 | 1912.04 | 957.38 | 1913.05 | 957.03 | 638.35 |
| 153 | 2011 | Ac-LTF$4rn6EYWAQCba$4a5SAA-NH2 | 1784.93 | 894.38 | 1785.94 | 893.47 | 595.98 |
| 454 | 2012 | Ac-LTF$4rn4EYWAQCba$4a5SAA-NH2 | 1756.89 | 880.05 | 1757.9 | 879.45 | 586.64 |
| 455 | 2013 | Ac-LTF$4rn5EYWAQCba$4a5SAA-NH2 | 1770.91 | 887.08 | 1771.92 | 886.46 | 591.31 |
| 456 | 2014 | Ac-LTF$5rn6EYWAQCba$5a5SAA-NH2 | 1784.92 | 894.11 | 1785.93 | 893.47 | 595.98 |
| 457 | 2015 | Ac-LTF$4rn6EYWAQCba5I-$4a5SAA-NH2 | 1910.82 | 957.01 | 1911.83 | 956.42 | 637.95 |
| 459 | 2016 | Ac-LTA$5rn6EYWAQCba$5a5SAA-NH2 | 1708.89 | 856 | 1709.9 | 855.45 | 570.64 |
| 460 | 2017 | Ac-LTA$4rn6EYWAQCba$4a5SAA-NH2 | 1708.89 | 856 | 1709.9 | 855.45 | 570.64 |
| 461 | 2018 | 5-FAM-BaLTF$4rn6EYWAQCba$4a5SAA-NH2 | 2172 | 1087.81 | 2173.01 | 1087.01 | 725.01 |
| 462 | 2019 | 5-FAM-BaLTA$4rn6EYWAQCba$4a5SAA-NH2 | 2095.97 | 1049.79 | 2096.98 | 1048.99 | 699.66 |
| 463 | 2020 | 5-FAM-BaLTF$5rn6EYWAQCba$5a5SAA-NH2 | 2172 | 1087.53 | 2173.01 | 1087.01 | 725.01 |
| 464 | 2021 | 5-FAM-BaLTA$5rn6EYWAQCba$5a5SAA-NH2 | 2095.97 | 1049.98 | 2096.98 | 1048.99 | 699.66 |
| 465 | 2022 | Ac-LTF$4rn6EYWAQCba5Ph-$4a5SAA-NH2 | 1675.87 | 932.31 | 1676.88 | 931.48 | 559.63 |
| 466 | 2023 | Ac-LTF$4rn6EYWAQCba5Prp-$4a5SAA-NH2 | 1675.87 | 914.46 | 1676.88 | 913.48 | 559.63 |
| 467 | 2024 | Ac-LTF$4rn6AYWAAL$4a5AAAAAa-NH2 | 1855.01 | | 1856.02 | 928.51 | 619.34 |
| 468 | 2025 | Ac-LTF$4rn6EYWAQCba5penNH2-$4a5SAA-NH2 | 1675.87 | | 1676.88 | 838.94 | 559.63 |
| 469 | 2026 | Ac-LTF$4rn6EYWAQCba5BnzNH2-$4a5SAA-NH2 | 1675.87 | | 1676.88 | 838.94 | 559.63 |
| 470 | 2027 | Ac-LTF$4rn6EYWAQCba5prpOMe-$4a5SAA-NH2 | | 929.17 | | 928.48 | |
| 932 | 2028 | Ac-LTF$5rn6EYWAQL4Me$5a5AAAAAa-NH2 | 1926.05 | | 1927.06 | 964.03 | 643.02 |
| 933 | 2029 | Ac-LTF$5rn6EYWAQL4Ph$5a5AAAAAa-NH2 | 1988.07 | | 1989.07 | 995.04 | 663.70 |
| 934 | 2030 | Ac-LTF$5rn6EYWAQCba4Me$5a5SAANH2 | 1740.93 | | 1741.94 | 871.48 | 581.32 |
| 935 | 2031 | Ac-LTF$5rn6EYWAQCba4Ph$5a5SAANH2 | 1802.95 | | 1803.96 | 902.48 | 601.99 |

[0521] In the sequences shown above and elsewhere, the following abbreviations are used: “Nle” represents norleucine, “Aib” represents 2-aminoisobutyric acid, “Ac” represents acetyl, and “Pr” represents propionyl. Amino acids represented as “$” are alpha-Me S5-pentenyl-alanine olefin amino acids connected by an all-carbon crosslinker comprising one double bond. Amino acids represented as “$r5” are alpha-Me R5-pentenyl-alanine olefin amino acids connected by an all-carbon comprising one double bond. Amino acids represented as “$s8” are alpha-Me S8-octenyl-alanine olefin amino acids connected by an all-carbon crosslinker comprising one double bond. Amino acids represented as “$r8” are alpha-Me R8-octenyl-alanine olefin amino acids connected by an all-carbon crosslinker comprising one double bond. “Ahx” represents an aminocyclohexyl linker. The crosslinkers are linear all-carbon crosslinker comprising eight or eleven carbon atoms between the alpha carbons of each amino acid. Amino acids represented as “$/” are alpha-Me S5-pentenyl-alanine olefin amino acids that are not connected by any crosslinker. Amino acids represented as “$/r5” are alpha-Me R5-pentenyl-alanine olefin amino acids that are not connected by any crosslinker. Amino acids represented as “$/s8” are alpha-Me S8-octenyl-alanine olefin amino acids that are not connected by any crosslinker. Amino acids represented as “$/r8” are alpha-Me R8-octenyl-alanine olefin amino acids that are not connected by any crosslinker. Amino acids represented as “Amw” are alpha-Me tryptophan amino acids. Amino acids represented as “Aml” are alpha-Me leucine amino acids. Amino acids represented as “Amf” are alpha-Me phenylalanine amino acids. Amino acids represented as “2ff” are 2-fluoro-phenylalanine amino acids. Amino acids represented as “3ff” are 3-fluoro-phenylalanine amino acids. Amino acids represented as “St” are amino acids comprising two pentenyl-alanine olefin side chains, each of which is crosslinked to another amino acid as indicated. Amino acids represented as “St//” are amino acids comprising two pentenyl-alanine olefin side chains that are not crosslinked. Amino acids represented as “% St” are amino acids comprising two pentenyl-alanine olefin side chains, each of which is crosslinked to another amino acid as indicated via fully saturated hydrocarbon crosslinks. Amino acids represented as “Ba” are beta-alanine. The lower-case character “e” or “z” within the designation of a crosslinked amino acid (e.g. “$er8” or “$zr8”) represents the configuration of the double bond (E or Z, re ectively). In other contexts, lower-case letters such as “a” or “f” represent D amino acids (e.g. D-alanine, or D-phenylalanine, respectively). Amino acids designated as “NmW” represent N-methyltryptophan. Amino acids designated as “NmY” represent N-methyltyrosine. Amino acids designated as “NmA” represent N-methylalanine. Amino acids designated as “Sar” represent sarcosine. Amino acids designated as “Cha” represent cyclohexyl alanine. Amino acids designated as “Cpg” represent cyclopentyl glycine. Amino acids designated as “Chg” represent cyclohexyl glycine. Amino acids designated as “Cba” represent cyclobutyl alanine. Amino acids designated as “F4I” represent 4-iodo phenylalanine. Amino acids designated as “F3Cl” represent 3-chloro phenylalanine. Amino acids designated as “F4cooh” represent 4-carboxy phenylalanine. Amino acids designated as “F34F2” represent 3,4-difluoro phenylalanine. Amino acids designated as “6clW” represent 6-chloro tryptophan. The designation “iso1” or “iso2” indicates that the peptidomimetic macrocycle is a single isomer. “Ac3c” represents an aminocyclopropane carboxylic acid residue.

[0522] Amino acids forming crosslinkers are represented according to the legend indicated below.

[0523] Stereochemistry at the alpha position of each amino acid is S unless otherwise indicated. Amino acids labeled “4Me” were prepared using an amino acid comprising an alkyne which was methyl-substituted (internal alkyne), resulting in triazole groups comprising a methyl group at the 4-position. Amino acids labeled “4Ph” were prepared using an amino acid comprising an alkyne which was phenyl-substituted (internal alkyne), resulting in triazole groups comprising a phenyl group at the 4-position. For azide amino acids, the number of carbon atoms indicated refers to the number of methylene units between the alpha carbon and the terminal azide. For alkyne amino acids, the number of carbon atoms indicated is the number of methylene units between the alpha position and the triazole moiety plus the two carbon atoms within the triazole group derived from the alkyne.

| | |
|---|---|
| $5n3 | Alpha-Me azide 1,5 triazole (3 carbon) |
| #5n3 | Alpha-H azide 1,5 triazole (3 carbon) |
| $4a5 | Alpha-Me alkyne 1,4 triazole (5 carbon) |
| $4a6 | Alpha-Me alkyne 1,4 triazole (6 carbon) |
| $5a5 | Alpha-Me alkyne 1,5 triazole (5 carbon) |
| $5a6 | Alpha-Me alkyne 1,5 triazole (6 carbon) |
| #4a5 | Alpha-H alkyne 1,4 triazole (5 carbon) |
| #5a5 | Alpha-H alkyne 1,5 triazole (5 carbon) |
| $5n5 | Alpha-Me azide 1,5 triazole (5 carbon) |
| $5n6 | Alpha-Me azide 1,5 triazole (6 carbon) |
| $4n5 | Alpha-Me azide 1,4 triazole (5 carbon) |
| $4n6 | Alpha-Me azide 1,4 triazole (6 carbon) |
| $4ra5 | Alpha-Me R-alkyne 1,4 triazole (5 carbon) |
| $4ra6 | Alpha-Me R-alkyne 1,4 triazole (6 carbon) |
| $4rn4 | Alpha-Me R-azide 1,4 triazole (4 carbon) |
| $4rn5 | Alpha-Me R-azide 1,4 triazole (5 carbon) |
| $4rn6 | Alpha-Me R-azide 1,4 triazole (6 carbon) |
| $5rn5 | Alpha-Me R-azide 1,5 triazole (5 carbon) |
| $5ra5 | Alpha-Me R-alkyne 1,5 triazole (5 carbon) |
| $5ra6 | Alpha-Me R-alkyne 1,5 triazole (6 carbon) |
| $5rn6 | Alpha-Me R-azide 1,5 triazole (6 carbon) |
| #5rn6 | Alpha-H R-azide 1,5 triazole (6 carbon) |
| $4rn5 | Alpha-Me R-azide 1,4 triazole (5 carbon) |
| #4rn5 | Alpha-H R-azide 1,4 triazole (5 carbon) |
| 4Me$5rn6 | Alpha-Me R-azide 1,5 triazole (6 carbon); |
| | 4-Me substituted triazole |
| 4Me$5a5 | Alpha-Me alkyne 1,5 triazole (5 carbon); |
| | 4-Me substituted triazole |
| 4Ph$5a5 | Alpha-Me alkyne 1,5 triazole (5 carbon); |
| | 4-phenyl substituted triazole |

[0524] Amino acids designated as “5I”, “5penNH2”, “5BnzNH2”, “5prpOMe”, “5Ph”, and “5prp”, refer to crosslinked amino acids of the type shown in the following exemplary peptidomimetic macrocycle (SEQ ID NO: 2032):

[chemical structure]

[0525] In the above structure, X is, for example, one of the following substituents:

[chemical structure]

[0526] wherein “Cyc” is a suitable aryl, cycloalkyl, cycloalkenyl, heteroaryl, or heterocyclyl group, unsubstituted or optionally substituted with an Rₐ or R_{b} group as described above.

[0527] In some embodiments, the triazole substituent is chosen from the group consisting of:

[chemical structure]

[0528] Table 18 shows exemplary peptidomimetic macrocycles:

TABLE 18
(SEQ ID NOS 2033-2038, respectively, in order of appearance)

| | Structure |
|---|---|
| SP-449 | [chemical structure] |
| SP-64 | [chemical structure] |
| SP-153 | [chemical structure] |
| SP-98 | [chemical structure] |
| SP-456 | [chemical structure] |
| SP-470 | [chemical structure] |

[0529] In some embodiments, peptidomimetic macrocycles exclude peptidomimetic macrocycles shown in Table 19. Peptides shown can comprise an N-terminal capping group such as acetyl or an additional linker such as beta-alanine between the capping group and the start of the peptide sequence. In some embodiments, peptidomimetic macrocycles do not comprise a peptidomimetic macrocycle structure as shown in Table 19.

TABLE 19

| | SEQ | |
|---|---|---|
| # | ID NO: | Sequence |
| 1 | 2039 | Ac-QSQQTF$5rn6NLWRLL$5a5QN-NH2 |
| 2 | 2040 | Ac-QSQQTF$4rn5NLWRLL$4a5QN-NH2 |
| 3 | 2041 | Ac-QSQQTF#5rn6NLWRLL#5a5QN-NH2 |
| 4 | 2042 | Ac-QSQQTF#4rn5NLWRLL#4a5QN-NH2 |
| 5 | 2043 | Ac-QSQQTF$5rn5NLWRLL$5a5QN-NH2 |
| 6 | 2044 | Ac-QSQQTF$5ra5NLWRLL$5n5QN-NH2 |
| 7 | 2045 | Ac-QSQQTF$5ra5NLWRLL$5n6QN-NH2 |
| 8 | 2046 | Ac-QSQQTF$4ra5NLWRLL$4n5QN-NH2 |
| 9 | 2047 | Ac-QSQQTF$4ra5NLWRLL$4n6QN-NH2 |
| 10 | 2048 | Ac-QSQQTF$4rn6NLWRLL$4a5QN-NH2 |
| 11 | 2049 | Ac-QSQQTF$5rn6NLWRLL$5a6QN-NH2 |
| 12 | 2050 | Ac-QSQQTF$5ra6NLWRLL$5n6QN-NH2 |
| 13 | 2051 | Ac-QSQQTF$4rn6NLWRLL$4a6QN-NH2 |
| 14 | 2052 | Ac-QSQQTF$4ra6NLWRLL$4n6QN-NH2 |
| 15 | 2053 | Ac-QSQQTF$4rn5NLWRLL$4a6QN-NH2 |
| 16 | 2054 | Ac-QSQQTF4Me$5rn6NLWRLL4Me$5a5QN-NH2 |
| 17 | 2055 | Ac-LTF$4ra5HYWAQL$4n6S-NH2 |
| 18 | 2056 | H-F$4rn6HYWAQL$4a5S-NH2 |
| 19 | 2057 | Ac-LTF$4rn6HYWAQL$4a5S-NH2 |
| 20 | 2058 | Ac-F$4rn6HYWAQL$4a5S-NH2 |
| 21 | 2059 | Ac-LTF$4rn6HYWAQL$4a6S-NH2 |
| 22 | 2060 | Ac-LTF$5ra5HYWAQL$5n6S-NH2 |
| 23 | 2061 | Ac-LTF$4rn6AYWAQL$4a5A-NH2 |
| 24 | 2062 | Ac-LTF$5ra5HYWAQL$5n6S-NH2 |
| 25 | 2063 | Ac-LTF$4rn6AYWAQL$4a5A-NH2 |
| 26 | 2064 | Ac-LTFEHYWAQLTS-NH2 |

[0530] The fully protected resin-bound peptides are synthesized on a Rink amide MBHA resin (loading 0.62 mmol/g) on a 0.1 mmol scale. Deprotection of the temporary Fmoc group is achieved by 2×20 min treatments of the resin bound peptide with 25% (v/v) piperidine in NMP. After extensive flow washing with NMP and dichloromethane, coupling of each successive amino acid was achieved with 1×60 min incubation with the appropriate preactivated Fmoc-amino acid derivative. All protected amino acids (1 mmol) were dissolved in NMP and activated with HCTU (1 mmol) and DIEA (1 mmol) prior to transfer of the coupling solution to the deprotected resin-bound peptide. After coupling was completed, the resin was extensively flow washed in preparation for the next deprotection/coupling cycle. Acetylation of the amino terminus was carried out in the presence of acetic anhydride/DIEA in NMP/NMM. The LC-MS analysis of a cleaved and deprotected sample obtained from an aliquot of the fully assembled resin-bound peptide was accomplished in order to verifying the completion of each coupling.

[0531] In a typical example, a peptide resin (0.1 mmol) was washed with DCM. Deprotection of the temporary Mmt group was achieved by 3×3 min treatments of the resin bound peptide with 2% TFA/DCM 5% TIPS, then 30 min treatments until no orange color is observed in the filtrate. In between treatments the resin was extensively flow washed with DCM. After complete removal of Mmt, the resin was washed with 5% DIEA/NMP solution 3× and considered ready for bisthioether coupling. Resin was loaded into a reaction vial. DCM/DMF 1/1 was added to the reaction vessel, followed by DIEA (2.4 eq). After mixing well for 5 minutes, 4,4′-Bis(bromomethyl)biphenyl (1.05 eq) (TCI America B1921) was added. The reaction was then mechanically agitated at room temperature overnight. Where needed, the reaction was allowed additional time to reach completion. A similar procedure may be used in the preparation of five-methylene, six-methylene or seven-methylene crosslinkers (“% c7”, “% c6”, or “% c5”).

[0532] The bisthioether resin-bound peptides were deprotected and cleaved from the solid support by treatment with TFA/H₂O/TIS (94/3/3 v/v) for 3 h at room temperature. After filtration of the resin the TFA solution was precipitated in cold diethyl ether and centrifuged to yield the desired product as a solid. The crude product was purified by preparative HPLC. Table 6 shows a list of peptidomimetic macrocycles.

TABLE 6

| | SEQ | |
|---|---|---|
| SP | ID NO: | Sequence |
| 471 | 2065 | Ac-F%cs7AYWEAc3cL%c7AAA-NH2 |
| 472 | 2066 | Ac-F%cs7AYWEAc3cL%c7AAibA-NH2 |
| 473 | 2067 | Ac-LTF%cs7AYWAQL%c7SANle-NH2 |
| 474 | 2068 | Ac-LTF%cs7AYWAQL%c7SAL-NH2 |
| 475 | 2069 | Ac-LTF%cs7AYWAQL%c7SAM-NH2 |
| 476 | 2070 | Ac-LTF%cs7AYWAQL%c7SAhL-NH2 |
| 477 | 2071 | Ac-LTF%cs7AYWAQL%c7SAF-NH2 |
| 478 | 2072 | Ac-LTF%cs7AYWAQL%c7SAI-NH2 |
| 479 | 2073 | Ac-LTF%cs7AYWAQL%c7SAChg-NH2 |
| 480 | 2074 | Ac-LTF%cs7AYWAQL%c7SAAib-NH2 |
| 481 | 2075 | Ac-LTF%cs7AYWAQL%c7SAA-NH2 |
| 482 | 2076 | Ac-LTF%cs7AYWA%c7L%c7S%c7Nle-NH2 |
| 483 | 2077 | Ac-LTF%cs7AYWA%c7L%c7S%c7A-NH2 |
| 484 | 2078 | Ac-F%cs7AYWEAc3cL%c7AANle-NH2 |
| 485 | 2079 | Ac-F%cs7AYWEAc3cL%c7AAL-NH2 |
| 486 | 2080 | Ac-F%cs7AYWEAc3cL%c7AAM-NH2 |
| 487 | 2081 | Ac-F%cs7AYWEAc3cL%c7AAhL-NH2 |
| 488 | 2082 | Ac-F%cs7AYWEAc3cL%c7AAF-NH2 |
| 489 | 2083 | Ac-F%cs7AYWEAc3cL%c7AAI-NH2 |
| 490 | 2084 | Ac-F%cs7AYWEAc3cL%c7AAChg-NH2 |
| 491 | 2085 | Ac-F%cs7AYWEAc3cL%c7AACha-NH2 |
| 492 | 2086 | Ac-F%cs7AYWEAc3cL%c7AAAib-NH2 |
| 493 | 2087 | Ac-LTF%cs7AYWAQL%c7AAAibV-NH2 |
| 494 | 2088 | Ac-LTF%cs7AYWAQL%c7AAAibV-NH2 |
| 495 | 2089 | Ac-LTF%cs7AYWAQL%c7SAibAA-NH2 |
| 496 | 2090 | Ac-LTF%cs7AYWAQL%c7SAibAA-NH2 |
| 497 | 2091 | Ac-HLTF%cs7HHWHQL%c7AANleNle-NH2 |
| 498 | 2092 | Ac-DLTF%cs7HHWHQL%c7RRLV-NH2 |
| 499 | 2093 | Ac-HHTF%cs7HHWHQL%c7AAML-NH2 |
| 500 | 2094 | Ac-F%cs7HHWHQL%c7RRDCha-NH2 |
| 501 | 2095 | Ac-F%cs7HHWHQL%c7HRFV-NH2 |
| 502 | 2096 | Ac-HLTF%cs7HHWHQL%c7AAhLA-NH2 |
| 503 | 2097 | Ac-DLTF%cs7HHWHQL%c7RRChgl-NH2 |
| 504 | 2098 | Ac-DLTF%cs7HHWHQL%c7RRChgl-NH2 |
| 505 | 2099 | Ac-HHTF%cs7HHWHQL%c7AAChav-NH2 |
| 506 | 2100 | Ac-F%cs7HHWHQL%c7RRDa-NH2 |
| 507 | 2101 | Ac-F%cs7HHWHQL%c7HRAibG-NH2 |
| 508 | 2102 | Ac-F%cs7AYWAQL%c7HHNleL-NH2 |
| 509 | 2103 | Ac-F%cs7AYWSAL%c7HQANle-NH2 |
| 510 | 2104 | Ac-F%cs7AYWVQL%c7QHChgl-NH2 |
| 511 | 2105 | Ac-F%cs7AYWTAL%c7QQNlev-NH2 |
| 512 | 2106 | Ac-F%cs7AYWYQL%c7HAibAa-NH2 |
| 513 | 2107 | Ac-LTF%cs7AYWAQL%c7HHLa-NH2 |
| 514 | 2108 | Ac-LTF%cs7AYWAQL%c7HHLa-NH2 |
| 515 | 2109 | Ac-LTF%cs7AYWAQL%c7HQNlev-NH2 |
| 516 | 2110 | Ac-LTF%cs7AYWAQL%c7HQNlev-NH2 |
| 517 | 2111 | Ac-LTF%cs7AYWAQL%c7QQMl-NH2 |
| 518 | 2112 | Ac-LTF%cs7AYWAQL%c7QQMl-NH2 |
| 519 | 2113 | Ac-LTF%cs7AYWAQL%c7HAibhLV-NH2 |
| 520 | 2114 | Ac-LTF%cs7AYWAQL%c7AHFA-NH2 |
| 521 | 2115 | Ac-HLTF%cs7HHWHQL%c7AANlel-NH2 |
| 522 | 2116 | Ac-DLTF%cs7HHWHQL%c7RRLa-NH2 |
| 523 | 2117 | Ac-HHTF%cs7HHWHQL%c7AAMv-NH2 |
| 524 | 2118 | Ac-F%cs7HHWHQL%c7RRDA-NH2 |
| 525 | 2119 | Ac-F%cs7HHWHQL%c7HRFCha-NH2 |
| 526 | 2120 | Ac-F%cs7AYWEAL%c7AA-NHAm |
| 527 | 2121 | Ac-F%cs7AYWEAL%c7AA-NHiAm |
| 528 | 2122 | Ac-F%cs7AYWEAL%c7AA-NHnPr3Ph |
| 529 | 2123 | Ac-F%cs7AYWEAL%c7AA-NHnBu33Me |
| 530 | 2124 | Ac-F%cs7AYWEAL%c7AA-NHnPr |
| 531 | 2125 | Ac-F%cs7AYWEAL%c7AA-NHnEt2Ch |
| 532 | 2126 | Ac-F%cs7AYWEAL%c7AA-NHnEt2Cp |
| 533 | 2127 | Ac-F%cs7AYWEAL%c7AA-NHHex |
| 534 | 2128 | Ac-LTF%cs7AYWAQL%c7AAIA-NH2 |
| 535 | 2129 | Ac-LTF%cs7AYWAQL%c7AAIA-NH2 |
| 536 | 2130 | Ac-LTF%cs7AYWAAL%c7AAMA-NH2 |
| 537 | 2131 | Ac-LTF%cs7AYWAAL%c7AAMA-NH2 |
| 538 | 2132 | Ac-LTF%cs7AYWAQL%c7AANleA-NH2 |
| 539 | 2133 | Ac-LTF%cs7AYWAQL%c7AANleA-NH2 |
| 540 | 2134 | Ac-LTF%cs7AYWAQL%c7AAIa-NH2 |
| 541 | 2135 | Ac-LTF%cs7AYWAQL%c7AAIa-NH2 |
| 542 | 2136 | Ac-LTF%cs7AYWAAL%c7AAMa-NH2 |
| 543 | 2137 | Ac-LTF%cs7AYWAAL%c7AAMa-NH2 |
| 544 | 2138 | Ac-LTF%cs7AYWAQL%c7AANlea-NH2 |
| 545 | 2139 | Ac-LTF%cs7AYWAQL%c7AANlea-NH2 |
| 546 | 2140 | Ac-LTF%cs7AYWAAL%c7AAIv-NH2 |
| 547 | 2141 | Ac-LTF%cs7AYWAAL%c7AAIv-NH2 |
| 548 | 2142 | Ac-LTF%cs7AYWAQL%c7AAMv-NH2 |
| 549 | 2143 | Ac-LTF%cs7AYWAAL%c7AANlev-NH2 |
| 550 | 2144 | Ac-LTF%cs7AYWAAL%c7AANlev-NH2 |
| 551 | 2145 | Ac-LTF%cs7AYWAQL%c7AAIl-NH2 |
| 552 | 2146 | Ac-LTF%cs7AYWAQL%c7AAIl-NH2 |
| 553 | 2147 | Ac-LTF%cs7AYWAAL%c7AAMl-NH2 |
| 554 | 2148 | Ac-LTF%cs7AYWAQL%c7AANlel-NH2 |
| 555 | 2149 | Ac-LTF%cs7AYWAQL%c7AANlel-NH2 |
| 556 | 2150 | Ac-F%cs7AYWEAL%c7AAMA-NH2 |
| 557 | 2151 | Ac-F%cs7AYWEAL%c7AANleA-NH2 |
| 558 | 2152 | Ac-F%cs7AYWEAL%c7AAIa-NH2 |
| 559 | 2153 | Ac-F%cs7AYWEAL%c7AAMa-NH2 |
| 560 | 2154 | Ac-F%cs7AYWEAL%c7AANlea-NH2 |
| 561 | 2155 | Ac-F%cs7AYWEAL%c7AAIv-NH2 |
| 562 | 2156 | Ac-F%cs7AYWEAL%c7AAMv-NH2 |
| 563 | 2157 | Ac-F%cs7AYWEAL%c7AANlev-NH2 |
| 564 | 2158 | Ac-F%cs7AYWEAL%c7AAIl-NH2 |
| 565 | 2159 | Ac-F%cs7AYWEAL%c7AAMl-NH2 |
| 566 | 2160 | Ac-F%cs7AYWEAL%c7AANlel-NH2 |
| 567 | 2161 | Ac-F%cs7AYWEAL%c7AANlel-NH2 |
| 568 | 2162 | Ac-LTF%cs7AY6clWAQL%c7SAA-NH2 |
| 569 | 2163 | Ac-LTF%cs7AY6clWAQL%c7SAA-NH2 |
| 570 | 2164 | Ac-WTF%cs7FYWSQL%c7AVAa-NH2 |
| 571 | 2165 | Ac-WTF%cs7FYWSQL%c7AVAa-NH2 |
| 572 | 2166 | Ac-WTF%cs7VYWSQL%c7AVA-NH2 |
| 573 | 2167 | Ac-WTF%cs7VYWSQL%c7AVA-NH2 |
| 574 | 2168 | Ac-WTF%cs7FYWSQL%c7SAAa-NH2 |
| 575 | 2169 | Ac-WTF%cs7FYWSQL%c7SAAa-NH2 |
| 576 | 2170 | Ac-WTF%cs7VYWSQL%c7AVAaa-NH2 |
| 577 | 2171 | Ac-WTF%cs7VYWSQL%c7AVAaa-NH2 |
| 578 | 2172 | Ac-LTF%cs7AYWAQL%c7AVG-NH2 |
| 579 | 2173 | Ac-LTF%cs7AYWAQL%c7AVG-NH2 |
| 580 | 2174 | Ac-LTF%cs7AYWAQL%c7AVQ-NH2 |
| 581 | 2175 | Ac-LTF%cs7AYWAQL%c7AVQ-NH2 |
| 582 | 2176 | Ac-LTF%cs7AYWAQL%c7SAa-NH2 |
| 583 | 2177 | Ac-LTF%cs7AYWAQL%c7SAa-NH2 |
| 584 | 2178 | Ac-LTF%cs7AYWAQhL%c7SAA-NH2 |
| 585 | 2179 | Ac-LTF%cs7AYWAQhL%c7SAA-NH2 |
| 586 | 2180 | Ac-LTF%cs7AYWEQLStSA%c7-NH2 |
| 587 | 2181 | Ac-LTF%cs7AYWAQL%c7SLA-NH2 |
| 588 | 2182 | Ac-LTF%cs7AYWAQL%c7SLA-NH2 |
| 589 | 2183 | Ac-LTF%cs7AYWAQL%c7SWA-NH2 |
| 590 | 2184 | Ac-LTF%cs7AYWAQL%c7SWA-NH2 |
| 591 | 2185 | Ac-LTF%cs7AYWAQL%c7SVS-NH2 |
| 592 | 2186 | Ac-LTF%cs7AYWAQL%c7SAS-NH2 |
| 593 | 2187 | Ac-LTF%cs7AYWAQL%c7SVG-NH2 |
| 594 | 2188 | Ac-ETF%cs7VYWAQL%c7SAa-NH2 |
| 595 | 2189 | Ac-ETF%cs7VYWAQL%c7SAA-NH2 |
| 596 | 2190 | Ac-ETF%cs7VYWAQL%c7SVA-NH2 |
| 597 | 2191 | Ac-ETF%cs7VYWAQL%c7SLA-NH2 |
| 598 | 2192 | Ac-ETF%cs7VYWAQL%c7SWA-NH2 |
| 599 | 2193 | Ac-ETF%cs7KYWAQL%c7SWA-NH2 |
| 600 | 2194 | Ac-ETF%cs7VYWAQL%c7SVS-NH2 |
| 601 | 2195 | Ac-ETF%cs7VYWAQL%c7SAS-NH2 |
| 602 | 2196 | Ac-ETF%cs7VYWAQL%c7SVG-NH2 |
| 603 | 2197 | Ac-LTF%cs7VYWAQL%c7SSa-NH2 |
| 604 | 2198 | Ac-ETF%cs7VYWAQL%c7SSa-NH2 |
| 605 | 2199 | Ac-LTF%cs7VYWAQL%c7SNa-NH2 |
| 606 | 2200 | Ac-ETF%cs7VYWAQL%c7SNa-NH2 |
| 607 | 2201 | Ac-LTF%cs7VYWAQL%c7SAa-NH2 |
| 608 | 2202 | Ac-LTF%cs7VYWAQL%c7SVA-NH2 |
| 609 | 2203 | Ac-LTF%cs7VYWAQL%c7SVA-NH2 |
| 610 | 2204 | Ac-LTF%cs7VYWAQL%c7SWA-NH2 |
| 611 | 2205 | Ac-LTF%cs7VYWAQL%c7SVS-NH2 |
| 612 | 2206 | Ac-LTF%cs7VYWAQL%c7SVS-NH2 |
| 613 | 2207 | Ac-LTF%cs7VYWAQL%c7SAS-NH2 |
| 614 | 2208 | Ac-LTF%cs7VYWAQL%c7SAS-NH2 |
| 615 | 2209 | Ac-LTF%cs7VYWAQL%c7SVG-NH2 |
| 616 | 2210 | Ac-LTF%cs7VYWAQL%c7SVG-NH2 |
| 617 | 2211 | Ac-LTF%cs7EYWAQCha%c7SAA-NH2 |
| 618 | 2212 | Ac-LTF%cs7EYWAQCha%c7SAA-NH2 |
| 619 | 2213 | Ac-LTF%cs7EYWAQCpg%c7SAA-NH2 |
| 620 | 2214 | Ac-LTF%cs7EYWAQCpg%c7SAA-NH2 |
| 621 | 2215 | Ac-LTF%cs7EYWAQF%c7SAA-NH2 |
| 622 | 2216 | Ac-LTF%cs7EYWAQF%c7SAA-NH2 |
| 623 | 2217 | Ac-LTF%cs7EYWAQCba%c7SAA-NH2 |
| 624 | 2218 | Ac-LTF%cs7EYWAQCba%c7SAA-NH2 |
| 625 | 2219 | Ac-LTF3Cl%cs7EYWAQL%c7SAA-NH2 |
| 626 | 2220 | Ac-LTF3Cl%cs7EYWAQL%c7SAA-NH2 |
| 627 | 2221 | Ac-LTF34F2%cs7EYWAQL%c7SAA-NH2 |
| 628 | 2222 | Ac-LTF34F2%cs7EYWAQL%c7SAA-NH2 |
| 629 | 2223 | Ac-LTF34F2%cs7EYWAQhL%c7SAA-NH2 |
| 630 | 2224 | Ac-LTF34F2%cs7EYWAQhL%c7SAA-NH2 |
| 631 | 2225 | Ac-ETF%cs7EYWAQL%c7SAA-NH2 |
| 632 | 2226 | Ac-LTF%cs7AYWVQL%c7SAA-NH2 |
| 633 | 2227 | Ac-LTF%cs7AHWAQL%c7SAA-NH2 |
| 634 | 2228 | Ac-LTF%cs7AEWAQL%c7SAA-NH2 |
| 635 | 2229 | Ac-LTF%cs7ASWAQL%c7SAA-NH2 |
| 636 | 2230 | Ac-LTF%cs7AEWAQL%c7SAA-NH2 |
| 637 | 2231 | Ac-LTF%cs7ASWAQL%c7SAA-NH2 |
| 638 | 2232 | Ac-LTF%cs7AF4coohWAQL%c7SAA-NH2 |
| 639 | 2233 | Ac-LTF%cs7AF4coohWAQL%c7SAA-NH2 |
| 640 | 2234 | Ac-LTF%cs7AHWAQL%c7AAIa-NH2 |
| 641 | 2235 | Ac-ITF%cs7FYWAQL%c7AAIa-NH2 |
| 642 | 2236 | Ac-ITF%cs7EHWAQL%c7AAIa-NH2 |
| 643 | 2237 | Ac-ITF%cs7EHWAQL%c7AAIa-NH2 |
| 644 | 2238 | Ac-ETF%cs7EHWAQL%c7AAIa-NH2 |
| 645 | 2239 | Ac-ETF%cs7EHWAQL%c7AAIa-NH2 |
| 646 | 2240 | Ac-LTF%cs7AHWVQL%c7AAIa-NH2 |
| 647 | 2241 | Ac-ITF%cs7FYWVQL%c7AAIa-NH2 |
| 648 | 2242 | Ac-ITF%cs7EYWVQL%c7AAIa-NH2 |
| 649 | 2243 | Ac-ITF%cs7EHWVQL%c7AAIa-NH2 |
| 650 | 2244 | Ac-LTF%cs7AEWAQL%c7AAIa-NH2 |
| 651 | 2245 | Ac-LTF%cs7AF4coohWAQL%c7AAIa-NH2 |
| 652 | 2246 | Ac-LTF%cs7AF4coohWAQL%c7AAIa-NH2 |
| 653 | 2247 | Ac-LTF%cs7AHWAQL%c7AHFA-NH2 |
| 654 | 2248 | Ac-ITF%cs7FYWAQL%c7AHFA-NH2 |
| 655 | 2249 | Ac-ITF%cs7FYWAQL%c7AHFA-NH2 |
| 656 | 2250 | Ac-ITF%cs7FHWAQL%c7AEFA-NH2 |
| 657 | 2251 | Ac-ITF%cs7FHWAQL%c7AEFA-NH2 |
| 658 | 2252 | Ac-ITF%cs7EHWAQL%c7AHFA-NH2 |
| 659 | 2253 | Ac-ITF%cs7EHWAQL%c7AHFA-NH2 |
| 660 | 2254 | Ac-LTF%cs7AHWVQL%c7AHFA-NH2 |
| 661 | 2255 | Ac-ITF%cs7FYWVQL%c7AHFA-NH2 |
| 662 | 2256 | Ac-ITF%cs7EYWVQL%c7AHFA-NH2 |
| 663 | 2257 | Ac-ITF%cs7EHWVQL%c7AHFA-NH2 |
| 664 | 2258 | Ac-ITF%cs7EHWVQL%c7AHFA-NH2 |
| 665 | 2259 | Ac-ETF%cs7EYWAAL%c7SAA-NH2 |
| 666 | 2260 | Ac-LTF%cs7AYWVAL%c7SAA-NH2 |
| 667 | 2261 | Ac-LTF%cs7AHWAAL%c7SAA-NH2 |
| 668 | 2262 | Ac-LTF%cs7AEWAAL%c7SAA-NH2 |
| 669 | 2263 | Ac-LTF%cs7AEWAAL%c7SAA-NH2 |
| 670 | 2264 | Ac-LTF%cs7ASWAAL%c7SAA-NH2 |
| 671 | 2265 | Ac-LTF%cs7ASWAAL%c7SAA-NH2 |
| 672 | 2266 | Ac-LTF%cs7AYWAAL%c7AAIa-NH2 |
| 673 | 2267 | Ac-LTF%cs7AYWAAL%c7AAIa-NH2 |
| 674 | 2268 | Ac-LTF%cs7AYWAAL%c7AHFA-NH2 |
| 675 | 2269 | Ac-LTF%cs7EHWAQL%c7AHIa-NH2 |
| 676 | 2270 | Ac-LTF%cs7EHWAQL%c7AHIa-NH2 |
| 677 | 2271 | Ac-LTF%cs7AHWAQL%c7AHIa-NH2 |
| 678 | 2272 | Ac-LTF%cs7EYWAQL%c7AHIa-NH2 |
| 679 | 2273 | Ac-LTF%cs7AYWAQL%c7AAFa-NH2 |
| 680 | 2274 | Ac-LTF%cs7AYWAQL%c7AAFa-NH2 |
| 681 | 2275 | Ac-LTF%cs7AYWAQL%c7AAWa-NH2 |
| 682 | 2276 | Ac-LTF%cs7AYWAQL%c7AAVa-NH2 |
| 683 | 2277 | Ac-LTF%cs7AYWAQL%c7AAVa-NH2 |
| 684 | 2278 | Ac-LTF%cs7AYWAQL%c7AALa-NH2 |
| 685 | 2279 | Ac-LTF%cs7AYWAQL%c7AALa-NH2 |
| 686 | 2280 | Ac-LTF%cs7EYWAQL%c7AAIa-NH2 |
| 687 | 2281 | Ac-LTF%cs7EYWAQL%c7AAIa-NH2 |
| 688 | 2282 | Ac-LTF%cs7EYWAQL%c7AAFa-NH2 |
| 689 | 2283 | Ac-LTF%cs7EYWAQL%c7AAFa-NH2 |
| 690 | 2284 | Ac-LTF%cs7EYWAQL%c7AAVa-NH2 |
| 691 | 2285 | Ac-LTF%cs7EYWAQL%c7AAVa-NH2 |
| 692 | 2286 | Ac-LTF%cs7EHWAQL%c7AAIa-NH2 |
| 693 | 2287 | Ac-LTF%cs7EHWAQL%c7AAIa-NH2 |
| 694 | 2288 | Ac-LTF%cs7EHWAQL%c7AAWa-NH2 |
| 695 | 2289 | Ac-LTF%cs7EHWAQL%c7AAWa-NH2 |
| 696 | 2290 | Ac-LTF%cs7EHWAQL%c7AALa-NH2 |
| 697 | 2291 | Ac-LTF%cs7EHWAQL%c7AALa-NH2 |
| 698 | 2292 | Ac-ETF%cs7EHWVQL%c7AALa-NH2 |
| 699 | 2293 | Ac-LTF%cs7AYWAQL%c7AAAa-NH2 |
| 700 | 2294 | Ac-LTF%cs7AYWAQL%c7AAAa-NH2 |
| 701 | 2295 | Ac-LTF%cs7AYWAQL%c7AAAibA-NH2 |
| 702 | 2296 | Ac-LTF%cs7AYWAQL%c7AAAibA-NH2 |
| 703 | 2297 | Ac-LTF%cs7AYWAQL%c7AAAAa-NH2 |
| 704 | 2298 | Ac-LTF%c7r5AYWAQL%c7s8AAIa-NH2 |
| 705 | 2299 | Ac-LTF%c7r5AYWAQL%c7s8SAA-NH2 |
| 706 | 2300 | Ac-LTF%cs7AYWAQCba%c7AANleA-NH2 |
| 707 | 2301 | Ac-ETF%cs7AYWAQCba%c7AANleA-NH2 |
| 708 | 2302 | Ac-LTF%cs7EYWAQCba%c7AANleA-NH2 |
| 709 | 2303 | Ac-LTF%cs7AYWAQCba%c7AWNleA-NH2 |
| 710 | 2304 | Ac-ETF%cs7AYWAQCba%c7AWNleA-NH2 |
| 711 | 2305 | Ac-LTF%cs7EYWAQCba%c7AWNleA-NH2 |
| 712 | 2306 | Ac-LTF%cs7EYWAQCba%c7SAFA-NH2 |
| 713 | 2307 | Ac-LTF34F2%cs7EYWAQCba%c7SANleA-NH2 |
| 714 | 2308 | Ac-LTF%cs7EF4coohWAQCba%c7SANleA-NH2 |
| 715 | 2309 | Ac-LTF%cs7EYWSQCba%c7SANleA-NH2 |
| 716 | 2310 | Ac-LTF%cs7EYWWQCba%c7SANleA-NH2 |
| 717 | 2311 | Ac-LTF%cs7EYWAQCba%c7AAIa-NH2 |
| 718 | 2312 | Ac-LTF34F2%cs7EYWAQCba%c7AAIa-NH2 |
| 719 | 2313 | Ac-LTF%cs7EF4coohWAQCba%c7AAIa-NH2 |
| 720 | 2314 | Pam-ETF%cs7EYWAQCba%c7SAA-NH2 |
| 721 | 2315 | Ac-LThF%cs7EFWAQCba%c7SAA-NH2 |
| 722 | 2316 | Ac-LTA%cs7EYWAQCba%c7SAA-NH2 |
| 723 | 2317 | Ac-LTF%cs7EYAAQCba%c7SAA-NH2 |
| 724 | 2318 | Ac-LTF%cs7EY2NalAQCba%c7SAA-NH2 |
| 725 | 2319 | Ac-LTF%cs7AYWAQCba%c7SAA-NH2 |
| 726 | 2320 | Ac-LTF%cs7EYWAQCba%c7SAF-NH2 |
| 727 | 2321 | Ac-LTF%cs7EYWAQCba%c7SAFa-NH2 |
| 728 | 2322 | Ac-LTF%cs7AYWAQCba%c7SAF-NH2 |
| 729 | 2323 | Ac-LTF34F2%cs7AYWAQCba%c7SAF-NH2 |
| 730 | 2324 | Ac-LTF%cs7AF4coohWAQCba%c7SAF-NH2 |
| 731 | 2325 | Ac-LTF%cs7EY6clWAQCba%c7SAF-NH2 |
| 732 | 2326 | Ac-LTF%cs7AYWSQCba%c7SAF-NH2 |
| 733 | 2327 | Ac-LTF%cs7AYWWQCba%c7SAF-NH2 |
| 734 | 2328 | Ac-LTF%cs7AYWAQCba%c7AAIa-NH2 |
| 735 | 2329 | Ac-LTF34F2%cs7AYWAQCba%c7AAIa-NH2 |
| 736 | 2330 | Ac-LTF%cs7AY6clWAQCba%c7AAIa-NH2 |
| 737 | 2331 | Ac-LTF%cs7AF4coohWAQCba%c7AAIa-NH2 |
| 738 | 2332 | Ac-LTF%cs7EYWAQCba%c7AAFa-NH2 |
| 739 | 2333 | Ac-LTF%cs7EYWAQCba%c7AAFa-NH2 |
| 740 | 2334 | Ac-ETF%cs7AYWAQCba%c7AWNlea-NH2 |
| 741 | 2335 | Ac-LTF%cs7EYWAQCba%c7AWNlea-NH2 |
| 742 | 2336 | Ac-ETF%cs7EYWAQCba%c7AWNlea-NH2 |
| 743 | 2337 | Ac-ETF%cs7EYWAQCba%c7AWNlea-NH2 |
| 744 | 2338 | Ac-LTF%cs7AYWAQCba%c7SAFa-NH2 |
| 745 | 2339 | Ac-LTF%cs7AYWAQCba%c7SAFa-NH2 |
| 746 | 2340 | Ac-ETF%cs7AYWAQL%c7AWNlea-NH2 |
| 747 | 2341 | Ac-LTF%cs7EYWAQL%c7AWNlea-NH2 |
| 748 | 2342 | Ac-ETF%cs7EYWAQL%c7AWNlea-NH2 |
| 749 | 2343 | Dmaac-LTF%cs7EYWAQhL%c7SAA-NH2 |
| 750 | 2344 | Hexac-LTF%cs7EYWAQhL%c7SAA-NH2 |
| 751 | 2345 | Napac-LTF%cs7EYWAQhL%c7SAA-NH2 |
| 752 | 2346 | Decac-LTF%cs7EYWAQhL%c7SAA-NH2 |
| 753 | 2347 | Admac-LTF%cs7EYWAQhL%c7SAA-NH2 |
| 754 | 2348 | Tmac-LTF%cs7EYWAQhL%c7SAA-NH2 |
| 755 | 2349 | Pam-LTF%cs7EYWAQhL%c7SAA-NH2 |
| 756 | 2350 | Ac-LTF%cs7AYWAQCba%c7AANleA-NH2 |
| 757 | 2351 | Ac-LTF34F2%cs7EYWAQCba%c7AAIa-NH2 |
| 758 | 2352 | Ac-LTF34F2%cs7EYWAQCba%c7SAA-NH2 |
| 759 | 2353 | Ac-LTF34F2%cs7EYWAQCba%c7SAA-NH2 |
| 760 | 2354 | Ac-LTF%cs7EF4coohWAQCba%c7SAA-NH2 |
| 761 | 2355 | Ac-LTF%cs7EF4coohWAQCba%c7SAA-NH2 |
| 762 | 2356 | Ac-LTF%cs7EYWSQCba%c7SAA-NH2 |
| 763 | 2357 | Ac-LTF%cs7EYWSQCba%c7SAA-NH2 |
| 764 | 2358 | Ac-LTF%cs7EYWAQhL%c7SAA-NH2 |
| 765 | 2359 | Ac-LTF%cs7AYWAQhL%c7SAF-NH2 |
| 766 | 2360 | Ac-LTF%cs7AYWAQhL%c7SAF-NH2 |
| 767 | 2361 | Ac-LTF34F2%cs7AYWAQhL%c7SAA-NH2 |
| 768 | 2362 | Ac-LTF34F2%cs7AYWAQhL%c7SAA-NH2 |
| 769 | 2363 | Ac-LTF%cs7AF4coohWAQhL%c7SAA-NH2 |
| 770 | 2364 | Ac-LTF%cs7AF4coohWAQhL%c7SAA-NH2 |
| 771 | 2365 | Ac-LTF%cs7AYWSQhL%c7SAA-NH2 |
| 772 | 2366 | Ac-LTF%cs7AYWSQhL%c7SAA-NH2 |
| 773 | 2367 | Ac-LTF%cs7EYWAQL%c7AANleA-NH2 |
| 774 | 2368 | Ac-LTF34F2%cs7AYWAQL%c7AANleA-NH2 |
| 775 | 2369 | Ac-LTF%cs7AF4coohWAQL%c7AANleA-NH2 |
| 776 | 2370 | Ac-LTF%cs7AYWSQL%c7AANleA-NH2 |
| 777 | 2371 | Ac-LTF34F2%cs7AYWAQhL%c7AANleA-NH2 |
| 778 | 2372 | Ac-LTF34F2%cs7AYWAQhL%c7AANleA-NH2 |
| 779 | 2373 | Ac-LTF%cs7AF4coohWAQhL%c7AANleA-NH2 |
| 780 | 2374 | Ac-LTF%cs7AF4coohWAQhL%c7AANleA-NH2 |
| 781 | 2375 | Ac-LTF%cs7AYWSQhL%c7AANleA-NH2 |
| 782 | 2376 | Ac-LTF%cs7AYWSQhL%c7AANleA-NH2 |
| 783 | 2377 | Ac-LTF%cs7AYWAQhL%c7AAAAa-NH2 |
| 784 | 2378 | Ac-LTF%cs7AYWAQhL%c7AAAAa-NH2 |
| 785 | 2379 | Ac-LTF%cs7AYWAQL%c7AAAAAa-NH2 |
| 786 | 2380 | Ac-LTF%cs7AYWAQL%c7AAAAAAa-NH2 |
| 787 | 2381 | Ac-LTF%cs7AYWAQL%c7AAAAAAa-NH2 |
| 788 | 2382 | Ac-LTF%cs7EYWAQhL%c7AANleA-NH2 |
| 789 | 2383 | Ac-AATF%cs7AYWAQL%c7AANleA-NH2 |
| 790 | 2384 | Ac-LTF%cs7AYWAQL%c7AANleAA-NH2 |
| 791 | 2385 | Ac-ALTF%cs7AYWAQL%c7AANleAA-NH2 |
| 792 | 2386 | Ac-LTF%cs7AYWAQCba%c7AANleAA-NH2 |
| 793 | 2387 | Ac-LTF%cs7AYWAQhL%c7AANleAA-NH2 |
| 794 | 2388 | Ac-LTF%cs7EYWAQCba%c7SAAA-NH2 |
| 795 | 2389 | Ac-LTF%cs7EYWAQCba%c7SAAA-NH2 |
| 796 | 2390 | Ac-LTF%cs7EYWAQCba%c7SAAAA-NH2 |
| 797 | 2391 | Ac-LTF%cs7EYWAQCba%c7SAAAA-NH2 |
| 798 | 2392 | Ac-ALTF%cs7EYWAQCba%c7SAA-NH2 |
| 799 | 2393 | Ac-ALTF%cs7EYWAQCba%c7SAAA-NH2 |
| 800 | 2394 | Ac-ALTF%cs7EYWAQCba%c7SAA-NH2 |
| 801 | 2395 | Ac-LTF%cs7EYWAQL%c7AAAAAa-NH2 |
| 802 | 2396 | Ac-LTF%cs7EY6clWAQCba%c7SAA-NH2 |
| 803 | 2397 | Ac-LTF%cs7EF4cooh6clWAQCba%c7SANleA-NH2 |
| 804 | 2398 | Ac-LTF%cs7EF4cooh6clWAQCba%c7SANleA-NH2 |
| 805 | 2399 | Ac-LTF%cs7EF4cooh6clWAQCba%c7AAIa-NH2 |
| 806 | 2400 | Ac-LTF%cs7EF4cooh6clWAQCba%c7AAIa-NH2 |
| 807 | 2401 | Ac-LTF%cs7AY6clWAQL%c7AAAAAa-NH2 |
| 808 | 2402 | Ac-LTF%cs7AY6clWAQL%c7AAAAAa-NH2 |
| 809 | 2403 | Ac-F%cs7AY6clWEAL%c7AAAAAAa-NH2 |
| 810 | 2404 | Ac-ETF%cs7EYWAQL%c7AAAAAa-NH2 |
| 811 | 2405 | Ac-ETF%cs7EYWAQL%c7AAAAAa-NH2 |
| 812 | 2406 | Ac-LTF%cs7EYWAQL%c7AAAAAAa-NH2 |
| 813 | 2407 | Ac-LTF%cs7EYWAQL%c7AAAAAAa-NH2 |
| 814 | 2408 | Ac-LTF%cs7AYWAQL%c7AANleAAa-NH2 |
| 815 | 2409 | Ac-LTF%cs7AYWAQL%c7AANleAAa-NH2 |
| 816 | 2410 | Ac-LTF%cs7EYWAQCba%c7AAAAAa-NH2 |
| 817 | 2411 | Ac-LTF%cs7EYWAQCba%c7AAAAAa-NH2 |
| 818 | 2412 | Ac-LTF%cs7EF4coohWAQCba%c7AAAAAa-NH2 |
| 819 | 2413 | Ac-LTF%cs7EF4coohWAQCba%c7AAAAAa-NH2 |
| 820 | 2414 | Ac-LTF%cs7EYWSQCba%c7AAAAAa-NH2 |
| 821 | 2415 | Ac-LTF%cs7EYWSQCba%c7AAAAAa-NH2 |
| 822 | 2416 | Ac-LTF%cs7EYWAQCba%c7SAAa-NH2 |
| 823 | 2417 | Ac-LTF%cs7EYWAQCba%c7SAAa-NH2 |
| 824 | 2418 | Ac-ALTF%cs7EYWAQCba%c7SAAa-NH2 |
| 825 | 2419 | Ac-ALTF%cs7EYWAQCba%c7SAAa-NH2 |
| 826 | 2420 | Ac-ALTF%cs7EYWAQCba%c7SAAAa-NH2 |
| 827 | 2421 | Ac-ALTF%cs7EYWAQCba%c7SAAAa-NH2 |
| 828 | 2422 | Ac-AALTF%cs7EYWAQCba%c7SAAAa-NH2 |
| 829 | 2423 | Ac-AALTF%cs7EYWAQCba%c7SAAAa-NH2 |
| 830 | 2424 | Ac-RTF%cs7EYWAQCba%c7SAA-NH2 |
| 831 | 2425 | Ac-LRF%cs7EYWAQCba%c7SAA-NH2 |
| 832 | 2426 | Ac-LTF%cs7EYWRQCba%c7SAA-NH2 |
| 833 | 2427 | Ac-LTF%cs7EYWARCba%c7SAA-NH2 |
| 834 | 2428 | Ac-LTF%cs7EYWAQCba%c7RAA-NH2 |
| 835 | 2429 | Ac-LTF%cs7EYWAQCba%c7SRA-NH2 |
| 836 | 2430 | Ac-LTF%cs7EYWAQCba%c7SAR-NH2 |
| 837 | 2431 | 5-FAM-BaLTF%cs7EYWAQCba%c7SAA-NH2 |
| 838 | 2432 | 5-FAM-BaLTF%cs7AYWAQL%c7AANleA-NH2 |
| 839 | 2433 | Ac-LAF%cs7EYWAQL%c7AANleA-NH2 |
| 840 | 2434 | Ac-ATF%cs7EYWAQL%c7AANleA-NH2 |
| 841 | 2435 | Ac-AAF%cs7EYWAQL%c7AANleA-NH2 |
| 842 | 2436 | Ac-AAAF%cs7EYWAQL%c7AANleA-NH2 |
| 843 | 2437 | Ac-AAAAF%cs7EYWAQL%c7AANleA-NH2 |
| 844 | 2438 | Ac-AATF%cs7EYWAQL%c7AANleA-NH2 |
| 845 | 2439 | Ac-AALTF%cs7EYWAQL%c7AANleA-NH2 |
| 846 | 2440 | Ac-AAALTF%cs7EYWAQL%c7AANleA-NH2 |
| 847 | 2441 | Ac-LTF%cs7EYWAQL%c7AANleAA-NH2 |
| 848 | 2442 | Ac-ALTF%cs7EYWAQL%c7AANleAA-NH2 |
| 849 | 2443 | Ac-AALTF%cs7EYWAQL%c7AANleAA-NH2 |
| 850 | 2444 | Ac-LTF%cs7EYWAQCba%c7AANleAA-NH2 |
| 851 | 2445 | Ac-LTF%cs7EYWAQhL%c7AANleAA-NH2 |
| 852 | 2446 | Ac-ALTF%cs7EYWAQhL%c7AANleAA-NH2 |
| 853 | 2447 | Ac-LTF%cs7ANmYWAQL%c7AANleA-NH2 |
| 854 | 2448 | Ac-LTF%cs7ANmYWAQL%c7AANleA-NH2 |
| 855 | 2449 | Ac-LTF%cs7AYNmWAQL%c7AANleA-NH2 |
| 856 | 2450 | Ac-LTF%cs7AYNmWAQL%c7AANleA-NH2 |
| 857 | 2451 | Ac-LTF%cs7AYAmwAQL%c7AANleA-NH2 |
| 858 | 2452 | Ac-LTF%cs7AYAmwAQL%c7AANleA-NH2 |
| 859 | 2453 | Ac-LTF%cs7AYWAibQL%c7AANleA-NH2 |
| 860 | 2454 | Ac-LTF%cs7AYWAibQL%c7AANleA-NH2 |
| 861 | 2455 | Ac-LTF%cs7AYWAQL%c7AAibNleA-NH2 |
| 862 | 2456 | Ac-LTF%cs7AYWAQL%c7AAibNleA-NH2 |
| 863 | 2457 | Ac-LTF%cs7AYWAQL%c7AaNleA-NH2 |
| 864 | 2458 | Ac-LTF%cs7AYWAQL%c7AaNleA-NH2 |
| 865 | 2459 | Ac-LTF%cs7AYWAQL%c7ASarNleA-NH2 |
| 866 | 2460 | Ac-LTF%cs7AYWAQL%c7ASarNleA-NH2 |
| 867 | 2461 | Ac-LTF%cs7AYWAQL%c7AANleAib-NH2 |
| 868 | 2462 | Ac-LTF%cs7AYWAQL%c7AANleAib-NH2 |
| 869 | 2463 | Ac-LTF%cs7AYWAQL%c7AANleNmA-NH2 |
| 870 | 2464 | Ac-LTF%cs7AYWAQL%c7AANleNmA-NH2 |
| 871 | 2465 | Ac-LTF%cs7AYWAQL%c7AANleSar-NH2 |
| 872 | 2466 | Ac-LTF%cs7AYWAQL%c7AANleSar-NH2 |
| 873 | 2467 | Ac-LTF%cs7AYWAQL%c7AANleAAib-NH2 |
| 874 | 2468 | Ac-LTF%cs7AYWAQL%c7AANleAAib-NH2 |
| 875 | 2469 | Ac-LTF%cs7AYWAQL%c7AANleANmA-NH2 |
| 876 | 2470 | Ac-LTF%cs7AYWAQL%c7AANleANmA-NH2 |
| 877 | 2471 | Ac-LTF%cs7AYWAQL%c7AANleAa-NH2 |
| 878 | 2472 | Ac-LTF%cs7AYWAQL%c7AANleAa-NH2 |
| 879 | 2473 | Ac-LTF%cs7AYWAQL%c7AANleASar-NH2 |
| 880 | 2474 | Ac-LTF%cs7AYWAQL%c7AANleASar-NH2 |
| 881 | 2475 | Ac-LTF%c7/r8AYWAQL%c7/AANleA-NH2 |
| 882 | 2476 | Ac-LTFAibAYWAQLAibAANleA-NH2 |
| 883 | 2477 | Ac-LTF%cs7Cou4YWAQL%c7AANleA-NH2 |
| 884 | 2478 | Ac-LTF%cs7Cou4YWAQL%c7AANleA-NH2 |
| 885 | 2479 | Ac-LTF%cs7AYWCou4QL%c7AANleA-NH2 |
| 886 | 2480 | Ac-LTF%cs7AYWAQL%c7Cou4ANleA-NH2 |
| 887 | 2481 | Ac-LTF%cs7AYWAQL%c7Cou4ANleA-NH2 |
| 888 | 2482 | Ac-LTF%cs7AYWAQL%c7ACou4NleA-NH2 |
| 889 | 2483 | Ac-LTF%cs7AYWAQL%c7ACou4NleA-NH2 |
| 890 | 2484 | Ac-LTF%cs7AYWAQL%c7AANleA-OH |
| 891 | 2485 | Ac-LTF%cs7AYWAQL%c7AANleA-OH |
| 892 | 2486 | Ac-LTF%cs7AYWAQL%c7AANleA-NHnPr |
| 893 | 2487 | Ac-LTF%cs7AYWAQL%c7AANleA-NHnPr |
| 894 | 2488 | Ac-LTF%cs7AYWAQL%c7AANleA-NHnBu33Me |
| 895 | 2489 | Ac-LTF%cs7AYWAQL%c7AANleA-NHnBu33Me |
| 896 | 2490 | Ac-LTF%cs7AYWAQL%c7AANleA-NHHex |
| 897 | 2491 | Ac-LTF%cs7AYWAQL%c7AANleA-NHHex |
| 898 | 2492 | Ac-LTA%cs7AYWAQL%c7AANleA-NH2 |
| 899 | 2493 | Ac-LThL%cs7AYWAQL%c7AANleA-NH2 |
| 900 | 2494 | Ac-LTF%cs7AYAAQL%c7AANleA-NH2 |
| 901 | 2495 | Ac-LTF%cs7AY2NalAQL%c7AANleA-NH2 |
| 902 | 2496 | Ac-LTF%cs7EYWCou4QCba%c7SAA-NH2 |
| 903 | 2497 | Ac-LTF%cs7EYWCou7QCba%c7SAA-NH2 |
| 904 | 2498 | Dmaac-LTF%cs7EYWAQCba%c7SAA-NH2 |
| 905 | 2499 | Dmaac-LTF%cs7AYWAQL%c7AAAAAa-NH2 |
| 906 | 2500 | Dmaac-LTF%cs7AYWAQL%c7AAAAAa-NH2 |
| 907 | 2501 | Dmaac-LTF%cs7EYWAQL%c7AAAAAa-NH2 |
| 908 | 2502 | Dmaac-LTF%cs7EYWAQL%c7AAAAAa-NH2 |
| 909 | 2503 | Dmaac-LTF%cs7EF4coohWAQCba%c7AAIa-NH2 |
| 910 | 2504 | Dmaac-LTF%cs7EF4coohWAQCba%c7AAIa-NH2 |
| 911 | 2505 | Dmaac-LTF%cs7AYWAQL%c7AANleA-NH2 |
| 912 | 2506 | Dmaac-LTF%cs7AYWAQL%c7AANleA-NH2 |
| 913 | 2507 | Cou6BaLTF%cs7EYWAQhL%c7SAA-NH2 |
| 914 | 2508 | Cou8BaLTF%cs7EYWAQhL%c7SAA-NH2 |
| 915 | 2509 | Ac-LTF4I%cs7EYWAQL%c7AAAAAa-NH2 |

[0533] Table 21 shows exemplary peptidomimetic macrocycles:

TABLE 21

| | SEQ | | Exact | Found | Calc | Calc | Calc |
|---|---|---|---|---|---|---|---|
| SP | ID NO: | Sequence | Mass | Mass | (M + 1)/1 | (M + 2)/2 | (M + 3)/3 |
| 916 | 2510 | Ac-LTF%cs7AYWAQL%c7AANleA-NH2 | 1808.94 | | 1809.95 | 905.48 | 603.99 |
| 917 | 2511 | Ac-LTF%cs7AYWAQL%c7AAAAAa-NH2 | 1908.96 | | 1909.97 | 955.49 | 637.33 |
| 918 | 2512 | Ac-LTF%csBphAYWAQL%cBphAANleA-NH2 | 1890.92 | | 1909.97 | 955.49 | 637.33 |
| 919 | 2513 | Ac-LTF%csBphAYWAQL%cBphAAAAAa-NH2 | 1990.92 | 996.88 | | | |
| 920 | 2514 | Ac-LTF%csBphEYWAQCba%cBphSAA-NH2 | 1865.16 | 933.45 | | 933.58 | |
| 921 | 2515 | Ac-LTF#cs7EYWAQCba#c7SAA-NH2 | 1753.82 | | 1754.83 | 877.92 | 585.61 |
| 922 | 2516 | Ac-LTF#csBphEYWAQCba#cBphSAA-NH2 | 1835.81 | | 1836.82 | 918.91 | 612.94 |
| 923 | 2517 | Ac-LTF%csBphEYWAQL%cBphAAAAAa-NH2 | | | | | |
| 924 | 2518 | Ac-LTF%cs5AYWAQL%c5AANleA-NH2 | | | | | |
| 925 | 2519 | Ac-LTF%cs5AYWAQL%c5AAAAAa-NH2 | | | | | |
| 926 | 2520 | Ac-LTF%cs6AYWAQL%c6AANleA-NH2 | | | | | |
| 927 | 2521 | Ac-LTF%cs6AYWAQL%c6AAAAAa-NH2 | | | | | |
| 928 | 2522 | Ac-LTF%cs6EYWAQL%c6AAAAAa-NH2 | 1894.94 | | 1895.96 | 948.48 | 632.66 |
| 929 | 2523 | Ac-LTF%cs5EYWAQL%c5AAAAAa-NH2 | 1880.93 | | 1881.94 | 941.47 | 627.98 |
| 930 | 2524 | Ac-LTF%cs6EYWAQCba%c6SAANH2 | 1709.83 | | 1710.84 | 855.92 | 570.95 |
| 931 | 2525 | Ac-LTF%cs5EYWAQCba%c5SAANH2 | 1695.81 | | 1696.82 | 848.92 | 566.28 |

[0534] Partial structures of selected exemplary peptidomimetic macrocycles are shown below:

[chemical structure]

[0535] A structure of an exemplary peptidomimetic macrocycle is shown below:

[chemical structure]

[0536] Another structure of an exemplary peptidomimetic macrocycle is shown below:

[chemical structure]

[0537] Amino acids represented as “#cs5” are D-cysteine connected by an i to i+7, five-methylene crosslinker to another thiol-containing amino acid. Amino acids represented as “#c5” are L-cysteine connected by an i to i+7, five-methylene crosslinker to another thiol-containing amino acid. Amino acids represented as “#cs6” are D-cysteine connected by an i to i+7, six-methylene crosslinker to another thiol-containing amino acid. Amino acids represented as “#c6” are L-cysteine connected by an i to i+7, six-methylene crosslinker to another thiol-containing amino acid. Amino acids represented as “#cs7” are D-cysteine connected by an i to i+7, seven-methylene crosslinker to another thiol-containing amino acid. Amino acids represented as “#c7” are L-cysteine connected by an i to i+7, seven-methylene crosslinker to another thiol-containing amino acid. Amino acids represented as “#cs8” are D-cysteine connected by an i to i+7, eight-methylene crosslinker to another thiol-containing amino acid. Amino acids represented as “#c8” are L-cysteine connected by an i to i+7, eight-methylene crosslinker to another thiol-containing amino acid. Amino acids represented as “% cs7” are alpha-methyl-D-cysteine connected by an i to i+7, seven-methylene crosslinker to another thiol-containing amino acid. Amino acids represented as “% c7” are alpha-methyl-L-cysteine connected by an i to i+7, seven-methylene crosslinker to another thiol-containing amino acid. Amino acids represented as “% cs8” are alpha-methyl-D-cysteine connected by an i to i+7, eight-methylene crosslinker to another thiol-containing amino acid. Amino acids represented as “% c8” are alpha-methyl-L-cysteine connected by an i to i+7, eight-methylene crosslinker to another thiol-containing amino acid. Amino acids represented as “% cs9” are alpha-methyl-D-cysteine connected by an i to i+7, nine-methylene crosslinker to another thiol-containing amino acid. Amino acids represented as “% c9” are alpha-methyl-L-cysteine connected by an i to i+7, nine-methylene crosslinker to another thiol-containing amino acid. Amino acids represented as “% cs10” are alpha-methyl-D-cysteine connected by an i to i+7, ten-methylene crosslinker to another thiol-containing amino acid. Amino acids represented as “% c10” are alpha-methyl-L-cysteine connected by an i to i+7, ten-methylene crosslinker to another thiol-containing amino acid. Amino acids represented as “pen8” are D-penicillamine connected by an i to i+7, eight-methylene crosslinker to another thiol-containing amino acid. Amino acids represented as “Pen8” are L-penicillamine connected by an i to i+7, eight-methylene crosslinker to another thiol-containing amino acid. Amino acids represented as “#csBph” are D-cysteine connected by an i to i+7, Bph (4,4′-bismethyl-biphenyl) crosslinker to another thiol-containing amino acid. Amino acids represented as “#cBph” are L-cysteine connected by an i to i+7, Bph (4,4′-bismethyl-biphenyl) crosslinker to another thiol-containing amino acid. Amino acids represented as “% csBph” are alpha-methyl-D-cysteine connected by an i to i+7, Bph (4,4′-bismethyl-biphenyl) crosslinker to another thiol-containing amino acid. Amino acids represented as “% cBph” are alpha-methyl-L-cysteine connected by an i to i+7, Bph (4,4′-bismethyl-biphenyl) crosslinker to another thiol-containing amino acid. Amino acids represented as “#csBpy” are D-cysteine connected by an i to i+7, Bpy (6,6′-bismethyl-[3,3′]bipyridine) crosslinker to another thiol-containing amino acid. Amino acids represented as “#cBpy” are L-cysteine connected by an i to i+7, Bpy (6,6′-bismethyl-[3,3′]bipyridine) crosslinker to another thiol-containing amino acid. Amino acids represented as “% csBpy” are alpha-methyl-D-cysteine connected by an i to i+7, Bpy (6,6′-bismethyl-[3,3′]bipyridine) crosslinker to another thiol-containing amino acid. Amino acids represented as “% cBpy” are alpha-methyl-L-cysteine connected by an i to i+7, Bpy (6,6′-bismethyl-[3,3′]bipyridine) crosslinker to another thiol-containing amino acid. The number of methylene units indicated above refers to the number of methylene units between the two thiol groups of the crosslinker.

[0538] In some embodiments, peptidomimetic macrocycles exclude peptidomimetic macrocycles shown in Table 22. Peptides shown can comprise an N-terminal capping group such as acetyl or an additional linker such as beta-alanine between the capping group and the start of the peptide sequence. In some embodiments, peptidomimetic macrocycles do not comprise a peptidomimetic macrocycle structure as shown in Table 22.

TABLE 22

| | SEQ | |
|---|---|---|
| # | ID NO: | Sequence |
| 1 | 2530 | QSQQTF%csNLWLL%cs6QN |
| 2 | 2531 | QSQQTF%csNLWLL%cs7QN |
| 3 | 2532 | QSQQTF%csNLWLL%cs8QN |
| 4 | 2533 | QSQQTF%csNLWLL%cs9QN |

[0539] In other embodiments, peptidomimetic macrocycles exclude peptidomimetic macrocycles shown in Table 23. In some embodiments, peptidomimetic macrocycles do not comprise a peptidomimetic macrocycle structure as shown in Table 23.

TABLE 23

| | SEQ | |
|---|---|---|
| Number | ID NO: | Sequence |
| 1 | 2534 | Ac-QSQQTF#cs5NLWRLL#c5QN-NH2 |
| 2 | 2535 | Ac-QSQQTF#cs6NLWRLL#c6QN-NH2 |
| 3 | 2536 | Ac-QSQQTF#cs7NLWRLL#c7QN-NH2 |
| 4 | 2537 | Ac-QSQQTF#cs8NLWRLL#c8QN-NH2 |
| 5 | 2538 | Ac-QSQQTF#cs9NLWRLL#c9QN-NH2 |
| 6 | 2539 | Ac-QSQQTF%cs8NLWRLL%c8QN-NH2 |
| 7 | 2540 | Ac-QSQQTF#cs8NLWRLLPen8QN-NH2 |
| 8 | 2541 | Ac-QSQQTF#c8NLWRLL#c8QN-NH2 |
| 9 | 2542 | Ac-QSQQTF#c8NLWRLL#cs8QN-NH2 |
| 10 | 2543 | Ac-QSQQTF#cs8NLWALL#c8AN-NH2 |
| 11 | 2544 | Ac-QAibQQTF#cs8NLWALL#c8AN-NH2 |
| 12 | 2545 | Ac-QAibQQTF#cs8ALWALL#c8AN-NH2 |
| 13 | 2546 | Ac-QSQQTFpen8NLWRLLPen8QN-NH2 |
| 14 | 2547 | Ac-QSQQTFpen8NLWRLL#c8QN-NH2 |
| 15 | 2548 | Ac-QSQQTF%cs9NLWRLL%c9QN-NH2 |
| 16 | 2549 | Ac-LTF#cs8HYWAQL#c8S-NH2 |
| 17 | 2550 | Ac-LTF#cs8HYWAQI#c8S-NH2 |
| 18 | 2551 | Ac-LTF#cs8HYWAQNle#c8S-NH2 |
| 19 | 2552 | Ac-LTF#cs8HYWAQL#c8A-NH2 |
| 20 | 2553 | Ac-LTF#cs8HYWAbuQL#c8S-NH2 |
| 21 | 2554 | Ac-LTF#cs8AYWAQL#c8S-NH2 |
| 22 | 2555 | Ac-LTF#cs8AYWAQL#c8A-NH2 |
| 23 | 2556 | Ac-LTF#cs8HYWAQLPen8S-NH2 |
| 24 | 2557 | Ac-LTFpen8HYWAQLPen8S-NH2 |
| 25 | 2558 | Ac-LTFpen8HYWAQL#c8S-NH2 |
| 26 | 2559 | Ac-LTF#cs7HYWAQL#hc7S-NH2 |
| 27 | 2560 | Ac-LTF%cs8HYWAQL%c8S-NH2 |
| 28 | 2561 | Ac-LTF%cs9HYWAQL%c9S-NH2 |
| 29 | 2562 | Ac-LTF%cs10HYWAQL%c10S-NH2 |
| 30 | 2563 | Ac-LTF%cs7HYWAQL%c7S-NH2 |
| 31 | 2564 | Ac-LTF%cs4BEBHYWAQL%c4BEBS-NH2 |
| 32 | 2565 | Ac-Fpen8AYWEAc3cL#c8A-NH2 |
| 33 | 2566 | Ac-F#cs8AYWEAc3cL#c8A-NH2 |
| 34 | 2567 | Ac-F%cs8AYWEAc3cL%c8A-NH2 |
| 35 | 2568 | Ac-LTFEHYWAQLTS-NH2 |

[0540] In other embodiments, peptidomimetic macrocycles exclude peptidomimetic macrocycles shown in Table 24 and disclosed in Muppidi et al., Chem. Commun. (2011) DOI: 10.1039/c1cc13320a. In some embodiments, peptidomimetic macrocycles do not comprise a peptidomimetic macrocycle structure as shown in Table 24.

TABLE 24

| | SEQ | |
|---|---|---|
| Number | ID NO: | Sequence |
| 1 | 2569 | LTFEHYWAQLTS |
| 2 | 2570 | LTFCHYWAQLCS |
| 3 | 2571 | LTF#cBphHYWAQL#cBphS |
| 4 | 2572 | LTF#cBpyHYWAQL#cBpyS |
| 5 | 2573 | LTFCRYWARLCS |
| 6 | 2574 | LTF#cBphRYWARL#cBphS |
| 7 | 2575 | LTF#cBpyRYWARL#cBpyS |
| 8 | 2576 | LTFcHYWAQLCS |
| 9 | 2577 | LTF#csBphHYWAQL#cBphS |
| 10 | 2578 | LTF#csBpyHYWAQL#csBpyS |
| 11 | 2579 | LTF#csBphRYWARL#cBphS |
| 12 | 2580 | LTF#csBpyRYWARL#cBpyS |

wherein C denotes L-cysteine and c denotes D-cysteine and #cBph, #cBpy, #csBph, and #csBpy are as defined herein.

### Example 3. Competition Binding ELISA (HDM2 & HDMX)

[0541] p53-His6 protein (30 nM/well) is coated overnight at room temperature in the wells of a 96-well Immulon plates. On the day of the experiment, plates are washed with 1×PBS-Tween 20 (0.05%) using an automated ELISA plate washer, blocked with ELISA Micro well Blocking for 30 minutes at room temperature; excess blocking agent is washed off by washing plates with 1×PBS-Tween 20 (0.05%). Peptides are diluted from 10 mM DMSO stocks to 500 μM working stocks in sterile water, further dilutions made in 0.5% DMSO to keep the concentration of DMSO constant across the samples. The peptides are added to wells at 2× desired concentrations in 50 μl volumes, followed by addition of diluted GST-HDM2 or GST-HMDX protein (final concentration: 10 nM). Samples are incubated at room temperature for 2h, plates are washed with PBS-Tween 20 (0.05%) prior to adding 100 μl of HRP-conjugated anti-GST antibody [Hypromatrix, INC] diluted to 0.5 μg/ml in HRP-stabilizing buffer. Post 30 min incubation with detection antibody, plates are washed and incubated with 100 μl per well of TMB-E Substrate solution up to 30 minutes; reactions are stopped using 1 M HCl and absorbance measured at 450 nm on micro plate reader. Data is analyzed using GraphPad PRISM software.

### Example 4. SJSA-1 Cell Viability Assay

[0542] SJSA1 cells are seeded at the density of 5000 cells/100 μl/well in 96-well plates a day prior to assay. On the day of study cells are washed once with Opti-MEM Media and 90 μL of the Opti-MEM Media is added to cells. Peptides are diluted from 10 mM DMSO stocks to 500 μM working stocks in sterile water, further dilutions made in 0.5% DMSO to keep the concentration of DMSO constant across the samples. The final concentration range μM will be 50, 25, 12.5, 6.25, 3.1, 1.56, 0.8 and 0 μM in 100 μL final volume per well for peptides. Final highest DMSO concentration is 0.5% and will be used as the negative control. Cayman Chemicals Cell-Based Assay (−)-Nutlin-3 (10 mM) is used as positive control. Nutlin was diluted using the same dilution scheme as peptides 10 μl of 10× desired concentrations is added to the appropriate well to achieve the final desired concentrations. Cells are then incubated with peptides for 20-24h at 37° C. in humidified 5% CO2 atmosphere. Post-incubation period, cell viability is measured using Promega Cell Titer-Glo reagents according to manufacturer′ instructions.

### Example 5. SJSA-1 p21 Up-Regulation Assay

[0543] SJSA1 cells are seeded at the density of 0.8 million cells/2 ml/well in 6-well plates a day prior to assay. On the day of study cells are washed once with Opti-MEM Media and 1350 μL of the Opti-MEM Media is added to cells. Peptides are diluted from 10 mM DMSO stocks to 500 μM working stocks in sterile water, further dilutions made in 0.5% DMSO to keep the concentration of DMSO constant across the samples. Final highest DMSO concentration is 0.5% and is used as the negative control. Cayman Chemicals Cell-Based Assay (−)-Nutlin-3 (10 mM) is used as positive control. Nutlin is diluted using the same dilution scheme as peptides 150 μl of 10× desired concentrations is added to the appropriate well to achieve the final desired concentrations. Cells are then incubated with peptides for 18-20 h at 37° C. in humidified 5% CO₂ atmosphere. Post-incubation period, cells are harvested, washed with 1×PBS (without Ca++/Mg++) and lysed in 1× Cell lysis buffer (Cell Signaling technologies 10× buffer diluted to 1× and supplemented with protease inhibitors and Phosphatase inhibitors) on ice for 30 min. Lysates are centrifuged at 13000 rpm speed in a microfuge at 40° C. for 8 min; clear supernatants are collected and stored at −80° C. until further use. Total protein content of the lysates is measured using BCA protein detection kit and BSA standards from Thermofisher. 25 μg of the total protein is used for p21 detection ELISA assay. Each condition is set in triplicate for ELISA plate. The ELISA assay protocol is followed as per the manufacturer's instructions. 25 μg total protein used for each well, and each well is set up in triplicate. Data is analyzed using GraphPad PRISM software.

### Example 6: p53 GRIP Assay

[0544] Thermo Scientific* BioImage p53-Hdm2 Redistribution Assay monitors the protein interaction with Hdm2 and cellular translocation of GFP-tagged p53 in response to drug compounds or other stimuli. Recombinant CHO-hIR cells stably express human p53(1-312) fused to the C-terminus of enhanced green fluorescent protein (EGFP) and PDE4A4-Hdm2(1-124), a fusion protein between PDE4A4 and Hdm2(1-124). They provide a ready-to-use assay system for measuring the effects of experimental conditions on the interaction of p53 and Hdm2. Imaging and analysis is performed with a HCS platform.

[0545] CHO-hIR cells are regularly maintained in Ham's F12 media supplemented with 1% Penicillin-Streptomycin, 0.5 mg/ml Geneticin, 1 mg/ml Zeocin and 10% FBS. Cells seeded into 96-well plates at the density of 7000 cells/100 μl per well 18-24 hours prior to running the assay using culture media. The next day, media is refreshed and PD177 is added to cells to the final concentration of 3 μM to activate foci formation. Control wells are kept without PD-177 solution. 24h post stimulation with PD177, cells are washed once with Opti-MEM Media and 50 μL of the Opti-MEM Media supplemented with PD-177(6 μM) is added to cells. Peptides are diluted from 10 mM DMSO stocks to 500 μM working stocks in sterile water, further dilutions made in 0.5% DMSO to keep the concentration of DMSO constant across the samples. Final highest DMSO concentration is 0.5% and is used as the negative control. Cayman Chemicals Cell-Based Assay (−)-Nutlin-3 (10 mM) is used as positive control. Nutlin was diluted using the same dilution scheme as peptides. 50 μl of 2× desired concentrations is added to the appropriate well to achieve the final desired concentrations. Cells are then incubated with peptides for 6 h at 37° C. in humidified 5% CO2 atmosphere. Post-incubation period, cells are fixed by gently aspirating out the media and adding 150 μl of fixing solution per well for 20 minutes at room temperature. Fixed cells are washed 4 times with 200 μl PBS per well each time. At the end of last wash, 100 μl of 1 μM Hoechst staining solution is added. Sealed plates incubated for at least 30 min in dark, washed with PBS to remove excess stain and PBS is added to each well. Plates can be stored at 4° C. in dark up to 3 days. The translocation of p53/HDM2 is imaged using Molecular translocation module on Cellomics Arrayscan instrument using 10× objective, XF-100 filter sets for Hoechst and GFP. The output parameters was Mean-CircRINGAveIntenRatio (the ratio of average fluorescence intensities of nucleus and cytoplasm, (well average)). The minimally acceptable number of cells per well used for image analysis was set to 500 cells.

### Example 7. Circular Dichroism (CD) Analysis of Alpha-Helicity

[0546] Peptide solutions were analyzed by CD spectroscopy using a Jasco J-815 spectropolarimeter (Jasco Inc., Easton, Md.) with the Jasco Spectra Manager Ver.2 system software. A Peltier temperature controller was used to maintain temperature control of the optical cell. Results are expressed as mean molar ellipticity [θ] (deg cm²dmol⁻¹) as calculated from the equation [θ]=θobs·MRW/10*1*c where θobs is the observed ellipticity in millidegrees, MRW is the mean residue weight of the peptide (peptide molecular weight/number of residues), 1 is the optical path length of the cell in centimeters, and c is the peptide concentration in mg/ml. Peptide concentrations were determined by amino acid analysis. Stock solutions of peptides were prepared in benign CD buffer (20 mM phosphoric acid, pH 2). The stocks were used to prepare peptide solutions of 0.05 mg/ml in either benign CD buffer or CD buffer with 50% trifluoroethanol (TFE) for analyses in a 10 mm pathlength cell. Variable wavelength measurements of peptide solutions were scanned at 4° C. from 195 to 250 nm, in 0.2 nm increments, and a scan rate 50 nm per minute. The average of six scans was reported.

[0547] Table 25 shows circular dichroism data for selected peptiomimetic macrocycles:

TABLE 25

| | Molar | Molar | Molar | | |
|---|---|---|---|---|---|
| | Ellip- | Ellip- | Ellip- | % Helix | % Helix |
| | ticity | ticity | ticity | 50% TFE | benign |
| | Benign | 50% TFE | TFE − Molar | compared | compared |
| | (222 in | (222 in | Ellipticity | to 50% TFE | to 50% TFE |
| SP# | 0% TFE) | 50% TFE) | Benign | parent (CD) | parent (CD) |
| 7 | 124 | −19921.4 | −20045.4 | 137.3 | −0.9 |
| 11 | −398.2 | −16623.4 | 16225.2 | 106.1 | 2.5 |
| 41 | −909 | −21319.4 | 20410.4 | 136 | 5.8 |
| 43 | −15334.5 | −18247.4 | 2912.9 | 116.4 | 97.8 |
| 69 | −102.6 | −21509.7 | −21407.1 | 148.2 | 0.7 |
| 71 | −121.2 | −17957 | −17835.9 | 123.7 | 0.8 |
| 154 | −916.2 | −30965.1 | −30048.9 | 213.4 | 6.3 |
| 230 | −213.2 | −17974 | −17760.8 | 123.9 | 1.5 |
| 233 | −477.9 | −19032.6 | −18554.7 | 131.2 | 3.3 |

### Example 8. Direct Binding Assay MDM2 with Fluorescence Polarization (FP)

[0548] The assay was performed according to the following general protocol:
[0549] 1. Dilute MDM2 (In-house, 41 kD) into FP buffer (High salt buffer—200 mM NaCl, 5 mM CHAPS, pH 7.5) to make 10 μM working stock solution.
[0550] 2. Add 30 μl of 10 μM of protein stock solution into A1 and B1 well of 96-well black HE microplate (Molecular Devices).
[0551] 3. Fill in 30 μl of FP buffer into column A2 to A12, B2 to B12, C1 to C12, and D1 to D12.
[0552] 4. 2 or 3 fold series dilution of protein stock from A1, B1 into A2, B2; A2, B2 to A3, B3; . . . to reach the single digit nM concentration at the last dilution point.
[0553] 5. Dilute 1 mM (in 100% DMSO) of FAM labeled linear peptide with DMSO to 100 μM (dilution 1:10). Then, dilute from 100 μM to 10 μM with water (dilution 1:10) and then dilute with FP buffer from 10 μM to 40 nM (dilution 1:250). This is the working solution which will be a 10 nM concentration in well (dilution 1:4). Keep the diluted FAM labeled peptide in the dark until use.
[0554] 6. Add 10 μl of 10 nM of FAM labeled peptide into each well and incubate, and read at different time points.

[0555] Kd with 5-FAM-BaLTFEHYWAQLTS-NH₂ (SEQ ID NO: 2581) is ˜13.38 nM.

### Example 9. Competitive Fluorescence Polarization Assay for MDM2

[0556] The assay was performed according to the following general protocol:
[0557] 1. Dilute MDM2 (In-house, 41 kD) into FP buffer (High salt buffer-200 mM NaCl, 5 mM CHAPS, pH 7.5) to make 84 nM (2×) working stock solution.
[0558] 2. Add 20 μl of 84 nM (2×) of protein stock solution into each well of 96-well black HE microplate (Molecular Devices).
[0559] 3. Dilute 1 mM (in 100% DMSO) of FAM labeled linear peptide with DMSO to 100 μM (dilution 1:10). Then, dilute from 100 μM to 10 μM with water (dilution 1:10) and then dilute with FP buffer from 10 μM to 40 nM (dilution 1:250). This is the working solution which will be a 10 nM concentration in well (dilution 1:4). Keep the diluted FAM labeled peptide in the dark until use.
[0560] 4. Make unlabeled peptide dose plate with FP buffer starting with 1 μM (final) of peptide and making 5 fold serial dilutions for 6 points using following dilution scheme.
[0561] 5. Dilute 10 mM (in 100% DMSO) with DMSO to 5 mM (dilution 1:2). Then, dilute from 5 mM to 500 μM with H₂O (dilution 1:10) and then dilute with FP buffer from 500 μM to 20 μM (dilution 1:25). Making 5 fold serial dilutions from 4 μM (4×) for 6 points.
[0562] 6. Transfer 10 μl of serial diluted unlabeled peptides to each well which is filled with 20 μl of 84 nM of protein.
[0563] 7. Add 10 μl of 10 nM (4×) of FAM labeled peptide into each well and incubate for 3 hr to read.

[0564] Results from Examples 8 and 9 are provided in HDM2 data in FIGS. 6A-D.

### Example 10. Direct Binding Assay MDMX with Fluorescence Polarization (FP)

[0565] The assay was performed according to the following general protocol:
[0566] 1. Dilute MDMX (In-house, 40 kD) into FP buffer (High salt buffer—200 mM NaCl, 5 mM CHAPS, pH 7.5) to make 10 μM working stock solution.
[0567] 2. Add 30 μl of 10 μM of protein stock solution into A1 and B1 well of 96-well black HE microplate (Molecular Devices).
[0568] 3. Fill in 30 μl of FP buffer into column A2 to A12, B2 to B12, C1 to C12, and D1 to D12.
[0569] 4. 2 or 3 fold series dilution of protein stock from A1, B1 into A2, B2; A2, B2 to A3, B3; . . . to reach the single digit nM concentration at the last dilution point.
[0570] 5. Dilute 1 mM (in 100% DMSO) of FAM labeled linear peptide with DMSO to 100 μM (dilution 1:10). Then, dilute from 100 μM to 10 μM with water (dilution 1:10) and then dilute with FP buffer from 10 μM to 40 nM (dilution 1:250). This is the working solution which will be a 10 nM concentration in well (dilution 1:4). Keep the diluted FAM labeled peptide in the dark until use.
[0571] 6. Add 10 μl of 10 nM of FAM labeled peptide into each well and incubate, and read at different time points.

[0572] Kd with 5-FAM-BaLTFEHYWAQLTS-NH₂ (SEQ ID NO: 2581) is −51 nM.

### Example 11. Competitive Fluorescence Polarization Assay MDMX

[0573] The assay was performed according to the following general protocol:
[0574] 1. Dilute MDMX (In-house, 40 kD) into FP buffer (High salt buffer—200 mM NaCl, 5 mM CHAPS, pH 7.5.) to make 300 nM (2×) working stock solution.
[0575] 2. Add 20 μl of 300 nM (2×) of protein stock solution into each well of 96-well black HE microplate (Molecular Devices)
[0576] 3. Dilute 1 mM (in 100% DMSO) of FAM labeled linear peptide with DMSO to 100 μM (dilution 1:10). Then, dilute from 100 μM to 10 μM with water (dilution 1:10) and then dilute with FP buffer from 10 μM to 40 nM (dilution 1:250). This is the working solution which will be a 10 nM concentration in well (dilution 1:4). Keep the diluted FAM labeled peptide in the dark until use.
[0577] 4. Make unlabeled peptide dose plate with FP buffer starting with 5 μM (final) of peptide and making 5 fold serial dilutions for 6 points using following dilution scheme.
[0578] 5. Dilute 10 mM (in 100% DMSO) with DMSO to 5 mM (dilution 1:2). Then, dilute from 5 mM to 500 μM with H₂O (dilution 1:10) and then dilute with FP buffer from 500 μM to 20 μM (dilution 1:25). Making 5 fold serial dilutions from 20 μM (4×) for 6 points.
[0579] 6. Transfer 10 μl of serial diluted unlabeled peptides to each well which is filled with 20 μl of 300 nM of protein.
[0580] 7. Add 10 μl of 10 nM (4×) of FAM labeled peptide into each well and incubate for 3 hr to read.

[0581] Results from Examples 10 and 11 are provided in HDMX data in FIGS. 6A-D. Results from Example 11 is shown in Table 26A. The following scale is used: “+” represents a value greater than 1000 nM, “++” represents a value greater than 100 and less than or equal to 1000 nM, “+++” represents a value greater than 10 nM and less than or equal to 100 nM, and “++++” represents a value of less than or equal to 10 nM.

TABLE 26A

| SP# | IC50 (MDM2) | IC50 (MDMX) | Ki (MDM2) | Ki (MDMX) |
|---|---|---|---|---|
| 3 | ++ | ++ | +++ | +++ |
| 4 | +++ | ++ | ++++ | +++ |
| 5 | +++ | ++ | ++++ | +++ |
| 6 | ++ | ++ | +++ | +++ |
| 7 | +++ | +++ | ++++ | +++ |
| 8 | ++ | ++ | +++ | +++ |
| 9 | ++ | ++ | +++ | +++ |
| 10 | ++ | ++ | +++ | +++ |
| 11 | +++ | ++ | ++++ | +++ |
| 12 | + | + | +++ | ++ |
| 13 | ++ | ++ | +++ | ++ |
| 14 | +++ | +++ | ++++ | ++++ |
| 15 | +++ | ++ | +++ | +++ |
| 16 | +++ | +++ | ++++ | +++ |
| 17 | +++ | +++ | ++++ | +++ |
| 18 | +++ | +++ | ++++ | ++++ |
| 19 | ++ | +++ | +++ | +++ |
| 20 | ++ | ++ | +++ | +++ |
| 21 | ++ | +++ | +++ | +++ |
| 22 | +++ | +++ | ++++ | +++ |
| 23 | ++ | ++ | +++ | +++ |
| 24 | +++ | ++ | ++++ | +++ |
| 26 | +++ | ++ | ++++ | +++ |
| 28 | +++ | +++ | ++++ | +++ |
| 30 | ++ | ++ | +++ | +++ |
| 32 | +++ | ++ | ++++ | +++ |
| 38 | + | ++ | ++ | +++ |
| 39 | + | ++ | ++ | ++ |
| 40 | ++ | ++ | ++ | +++ |
| 41 | ++ | +++ | +++ | +++ |
| 42 | ++ | ++ | +++ | ++ |
| 43 | +++ | +++ | ++++ | +++ |
| 45 | +++ | +++ | ++++ | ++++ |
| 46 | +++ | +++ | ++++ | +++ |
| 47 | ++ | ++ | +++ | +++ |
| 48 | ++ | ++ | +++ | +++ |
| 49 | ++ | ++ | +++ | +++ |
| 50 | +++ | ++ | ++++ | +++ |
| 52 | +++ | +++ | ++++ | ++++ |
| 54 | ++ | ++ | +++ | +++ |
| 55 | + | + | ++ | ++ |
| 65 | +++ | ++ | ++++ | +++ |
| 68 | ++ | ++ | +++ | +++ |
| 69 | +++ | ++ | ++++ | +++ |
| 70 | ++ | ++ | ++++ | +++ |
| 71 | +++ | ++ | ++++ | +++ |
| 75 | +++ | ++ | ++++ | +++ |
| 77 | +++ | ++ | ++++ | +++ |
| 80 | +++ | ++ | ++++ | +++ |
| 81 | ++ | ++ | +++ | +++ |
| 82 | ++ | ++ | +++ | +++ |
| 85 | +++ | ++ | ++++ | +++ |
| 99 | ++++ | ++ | ++++ | +++ |
| 100 | ++ | ++ | ++++ | +++ |
| 101 | +++ | ++ | ++++ | +++ |
| 102 | ++ | ++ | ++++ | +++ |
| 103 | ++ | ++ | ++++ | +++ |
| 104 | +++ | ++ | ++++ | +++ |
| 105 | +++ | ++ | ++++ | +++ |
| 106 | ++ | ++ | +++ | +++ |
| 107 | ++ | ++ | +++ | +++ |
| 108 | +++ | ++ | ++++ | +++ |
| 109 | +++ | ++ | ++++ | +++ |
| 110 | ++ | ++ | ++++ | +++ |
| 111 | ++ | ++ | ++++ | +++ |
| 112 | ++ | ++ | +++ | +++ |
| 113 | ++ | ++ | +++ | +++ |
| 114 | +++ | ++ | ++++ | +++ |
| 115 | ++++ | ++ | ++++ | +++ |
| 116 | + | + | ++ | ++ |
| 118 | ++++ | ++ | ++++ | +++ |
| 120 | +++ | ++ | ++++ | +++ |
| 121 | ++++ | ++ | ++++ | +++ |
| 122 | ++++ | ++ | ++++ | +++ |
| 123 | ++++ | ++ | ++++ | +++ |
| 124 | ++++ | ++ | ++++ | +++ |
| 125 | ++++ | ++ | ++++ | +++ |
| 126 | ++++ | ++ | ++++ | +++ |
| 127 | ++++ | ++ | ++++ | +++ |
| 128 | ++++ | ++ | ++++ | +++ |
| 129 | ++++ | ++ | ++++ | +++ |
| 130 | ++++ | ++ | ++++ | +++ |
| 133 | ++++ | ++ | ++++ | +++ |
| 134 | ++++ | ++ | ++++ | +++ |
| 135 | ++++ | ++ | ++++ | +++ |
| 136 | ++++ | ++ | ++++ | +++ |
| 137 | ++++ | ++ | ++++ | +++ |
| 139 | ++++ | ++ | ++++ | +++ |
| 142 | ++++ | +++ | ++++ | +++ |
| 144 | ++++ | ++ | ++++ | +++ |
| 146 | ++++ | ++ | ++++ | +++ |
| 148 | ++++ | ++ | ++++ | +++ |
| 150 | ++++ | ++ | ++++ | +++ |
| 153 | ++++ | +++ | ++++ | +++ |
| 154 | ++++ | +++ | ++++ | ++++ |
| 156 | ++++ | ++ | ++++ | +++ |
| 158 | ++++ | ++ | ++++ | +++ |
| 160 | ++++ | ++ | ++++ | +++ |
| 161 | ++++ | ++ | ++++ | +++ |
| 166 | ++++ | ++ | ++++ | +++ |
| 167 | +++ | ++ | ++++ | ++ |
| 169 | ++++ | +++ | ++++ | +++ |
| 170 | ++++ | ++ | ++++ | +++ |
| 173 | ++++ | ++ | ++++ | +++ |
| 175 | ++++ | ++ | ++++ | +++ |
| 177 | +++ | ++ | ++++ | +++ |
| 180 | +++ | ++ | ++++ | +++ |
| 182 | ++++ | ++ | ++++ | +++ |
| 185 | +++ | + | ++++ | ++ |
| 186 | +++ | ++ | ++++ | +++ |
| 189 | +++ | ++ | ++++ | +++ |
| 192 | +++ | ++ | ++++ | +++ |
| 194 | +++ | ++ | ++++ | ++ |
| 196 | +++ | ++ | ++++ | +++ |
| 197 | ++++ | ++ | ++++ | +++ |
| 199 | +++ | ++ | ++++ | ++ |
| 201 | +++ | ++ | ++++ | ++ |
| 203 | +++ | ++ | ++++ | +++ |
| 204 | +++ | ++ | ++++ | +++ |
| 206 | +++ | ++ | ++++ | +++ |
| 207 | ++++ | ++ | ++++ | +++ |
| 210 | ++++ | ++ | ++++ | +++ |
| 211 | ++++ | ++ | ++++ | +++ |
| 213 | ++++ | ++ | ++++ | +++ |
| 215 | +++ | ++ | ++++ | +++ |
| 217 | ++++ | ++ | ++++ | +++ |
| 218 | ++++ | ++ | ++++ | +++ |
| 221 | ++++ | +++ | ++++ | +++ |
| 227 | ++++ | ++ | ++++ | +++ |
| 230 | ++++ | +++ | ++++ | ++++ |
| 232 | ++++ | ++ | ++++ | +++ |
| 233 | ++++ | +++ | ++++ | +++ |
| 236 | +++ | ++ | ++++ | +++ |
| 237 | +++ | ++ | ++++ | +++ |
| 238 | +++ | +++ | ++++ | +++ |
| 239 | +++ | ++ | +++ | +++ |
| 240 | +++ | ++ | ++++ | +++ |
| 241 | +++ | ++ | ++++ | +++ |
| 242 | +++ | ++ | ++++ | +++ |
| 243 | +++ | +++ | ++++ | +++ |
| 244 | +++ | +++ | ++++ | ++++ |
| 245 | +++ | +++ | ++++ | +++ |
| 246 | +++ | ++ | ++++ | +++ |
| 247 | +++ | +++ | ++++ | +++ |
| 248 | +++ | +++ | ++++ | +++ |
| 249 | +++ | +++ | ++++ | ++++ |
| 250 | ++ | + | ++ | + |
| 252 | ++ | + | ++ | + |
| 254 | +++ | ++ | ++++ | +++ |
| 255 | +++ | +++ | ++++ | +++ |
| 256 | +++ | +++ | ++++ | +++ |
| 257 | +++ | +++ | ++++ | +++ |
| 258 | +++ | ++ | ++++ | +++ |
| 259 | +++ | +++ | ++++ | +++ |
| 260 | +++ | +++ | ++++ | +++ |
| 261 | +++ | ++ | ++++ | +++ |
| 262 | +++ | ++ | ++++ | +++ |
| 263 | +++ | ++ | ++++ | +++ |
| 264 | +++ | +++ | ++++ | +++ |
| 266 | +++ | ++ | ++++ | +++ |
| 267 | +++ | +++ | ++++ | ++++ |
| 270 | ++++ | +++ | ++++ | +++ |
| 271 | ++++ | +++ | ++++ | ++++ |
| 272 | ++++ | +++ | ++++ | ++++ |
| 276 | +++ | +++ | ++++ | ++++ |
| 277 | +++ | +++ | ++++ | ++++ |
| 278 | +++ | +++ | ++++ | ++++ |
| 279 | ++++ | +++ | ++++ | +++ |
| 280 | +++ | ++ | ++++ | +++ |
| 281 | +++ | + | +++ | ++ |
| 282 | ++ | + | +++ | + |
| 283 | +++ | ++ | +++ | ++ |
| 284 | +++ | ++ | ++++ | +++ |
| 289 | +++ | +++ | ++++ | +++ |
| 291 | +++ | +++ | ++++ | ++++ |
| 293 | ++++ | +++ | ++++ | +++ |
| 306 | ++++ | ++ | ++++ | +++ |
| 308 | ++ | ++ | +++ | +++ |
| 310 | +++ | +++ | ++++ | +++ |
| 312 | +++ | ++ | +++ | +++ |
| 313 | ++++ | ++ | ++++ | +++ |
| 314 | ++++ | +++ | ++++ | ++++ |
| 315 | +++ | +++ | ++++ | +++ |
| 316 | ++++ | ++ | ++++ | +++ |
| 317 | +++ | ++ | +++ | +++ |
| 318 | +++ | ++ | +++ | +++ |
| 319 | +++ | ++ | +++ | ++ |
| 320 | +++ | ++ | +++ | ++ |
| 321 | +++ | ++ | ++++ | +++ |
| 322 | +++ | ++ | +++ | ++ |
| 323 | +++ | + | +++ | ++ |
| 328 | +++ | +++ | ++++ | +++ |
| 329 | +++ | +++ | ++++ | +++ |
| 331 | ++++ | +++ | ++++ | ++++ |
| 332 | ++++ | +++ | ++++ | ++++ |
| 334 | ++++ | +++ | ++++ | ++++ |
| 336 | ++++ | +++ | ++++ | ++++ |
| 339 | ++++ | ++ | ++++ | +++ |
| 341 | +++ | +++ | ++++ | ++++ |
| 343 | +++ | +++ | ++++ | ++++ |
| 347 | +++ | +++ | ++++ | +++ |
| 349 | ++++ | +++ | ++++ | ++++ |
| 351 | ++++ | +++ | ++++ | ++++ |
| 353 | ++++ | +++ | ++++ | ++++ |
| 355 | ++++ | +++ | ++++ | ++++ |
| 357 | ++++ | +++ | ++++ | ++++ |
| 359 | ++++ | +++ | ++++ | +++ |
| 360 | ++++ | ++++ | ++++ | ++++ |
| 363 | +++ | +++ | ++++ | ++++ |
| 364 | +++ | +++ | ++++ | ++++ |
| 365 | +++ | +++ | ++++ | ++++ |
| 366 | +++ | +++ | ++++ | +++ |
| 369 | ++ | ++ | +++ | +++ |
| 370 | +++ | +++ | ++++ | +++ |
| 371 | ++ | ++ | +++ | +++ |
| 372 | ++ | ++ | +++ | +++ |
| 373 | +++ | +++ | +++ | +++ |
| 374 | +++ | +++ | ++++ | ++++ |
| 375 | +++ | +++ | ++++ | ++++ |
| 376 | +++ | +++ | ++++ | ++++ |
| 377 | +++ | +++ | ++++ | +++ |
| 378 | +++ | +++ | ++++ | +++ |
| 379 | +++ | +++ | ++++ | +++ |
| 380 | +++ | +++ | ++++ | +++ |
| 381 | +++ | +++ | ++++ | +++ |
| 382 | +++ | +++ | ++++ | ++++ |
| 384 | ++ | + | ++ | + |
| 386 | ++ | + | ++ | + |
| 388 | ++ | +++ | +++ | ++++ |
| 390 | +++ | +++ | ++++ | +++ |
| 392 | +++ | +++ | ++++ | ++++ |
| 394 | ++++ | +++ | ++++ | ++++ |
| 396 | ++++ | ++++ | ++++ | ++++ |
| 398 | +++ | +++ | ++++ | +++ |
| 402 | ++++ | ++++ | ++++ | ++++ |
| 404 | +++ | +++ | ++++ | ++++ |
| 408 | +++ | +++ | ++++ | +++ |
| 410 | ++++ | ++++ | ++++ | ++++ |
| 411 | ++ | + | ++ | + |
| 412 | ++++ | +++ | ++++ | ++++ |
| 415 | ++++ | ++++ | ++++ | ++++ |
| 416 | +++ | +++ | ++++ | +++ |
| 417 | +++ | +++ | ++++ | +++ |
| 418 | ++++ | +++ | ++++ | ++++ |
| 419 | +++ | +++ | +++ | ++++ |
| 421 | ++++ | ++++ | ++++ | ++++ |
| 423 | +++ | +++ | ++++ | +++ |
| 425 | +++ | +++ | +++ | +++ |
| 427 | ++ | ++ | +++ | +++ |
| 432 | ++++ | +++ | ++++ | ++++ |
| 434 | +++ | +++ | ++++ | +++ |
| 435 | ++++ | +++ | ++++ | ++++ |
| 437 | +++ | +++ | ++++ | +++ |
| 439 | ++++ | +++ | ++++ | ++++ |
| 441 | ++++ | ++++ | ++++ | ++++ |
| 443 | +++ | +++ | ++++ | +++ |
| 445 | +++ | ++ | ++++ | +++ |
| 446 | +++ | + | ++++ | + |
| 447 | ++ | + | ++ | + |
| 551 | N/A | N/A | ++++ | +++ |
| 555 | N/A | N/A | ++++ | +++ |
| 556 | N/A | N/A | ++++ | +++ |
| 557 | N/A | N/A | +++ | +++ |
| 558 | N/A | N/A | +++ | +++ |
| 559 | N/A | N/A | +++ | +++ |
| 560 | N/A | N/A | + | + |
| 561 | N/A | N/A | ++++ | +++ |
| 562 | N/A | N/A | +++ | +++ |
| 563 | N/A | N/A | +++ | +++ |
| 564 | N/A | N/A | ++++ | +++ |
| 565 | N/A | N/A | +++ | +++ |
| 566 | N/A | N/A | ++++ | +++ |
| 567 | N/A | N/A | ++++ | +++ |
| 568 | N/A | N/A | ++++ | ++++ |
| 569 | N/A | N/A | ++++ | +++ |
| 570 | N/A | N/A | ++++ | +++ |
| 571 | N/A | N/A | ++++ | +++ |
| 572 | N/A | N/A | +++ | +++ |
| 573 | N/A | N/A | +++ | +++ |
| 574 | N/A | N/A | ++++ | +++ |
| 575 | N/A | N/A | ++++ | +++ |
| 576 | N/A | N/A | ++++ | +++ |
| 577 | N/A | N/A | ++++ | +++ |
| 578 | N/A | N/A | ++++ | +++ |
| 585 | N/A | N/A | +++ | +++ |
| 586 | N/A | N/A | ++++ | +++ |
| 587 | N/A | N/A | ++++ | ++++ |
| 589 | N/A | N/A | ++++ | |
| 594 | N/A | N/A | ++++ | ++++ |
| 596 | N/A | N/A | ++++ | +++ |
| 597 | N/A | N/A | ++++ | +++ |
| 598 | N/A | N/A | ++++ | +++ |
| 600 | N/A | N/A | ++++ | ++++ |
| 602 | N/A | N/A | ++++ | ++++ |
| 603 | N/A | N/A | ++++ | ++++ |
| 604 | N/A | N/A | +++ | +++ |
| 608 | N/A | N/A | ++++ | +++ |
| 609 | N/A | N/A | ++++ | +++ |
| 610 | N/A | N/A | ++++ | +++ |
| 611 | N/A | N/A | ++++ | +++ |
| 612 | N/A | N/A | ++++ | +++ |
| 613 | N/A | N/A | ++++ | +++ |
| 615 | N/A | N/A | ++++ | ++++ |
| 433 | N/A | N/A | ++++ | +++ |
| 686 | N/A | N/A | ++++ | +++ |
| 687 | N/A | N/A | ++ | ++ |
| 595 | N/A | N/A | + | N/A |
| 665 | N/A | N/A | +++ | N/A |
| 708 | N/A | N/A | +++ | +++ |
| 710 | N/A | N/A | +++ | +++ |
| 711 | N/A | N/A | +++ | ++ |
| 712 | N/A | N/A | ++++ | ++++ |
| 713 | N/A | N/A | ++++ | ++++ |
| 716 | N/A | N/A | ++++ | ++++ |
| 765 | + | + | | |
| 766 | +++ | + | | |
| 752 | ++ | + | | |
| 753 | +++ | + | | |
| 754 | ++ | + | | |
| 755 | ++++ | + | | |
| 756 | +++ | + | | |
| 757 | ++++ | + | | |
| 758 | +++ | + | | |

[0582] Results from Example 11 are also shown in Table 26B. The following scale is used for IC₅₀ and Ki values: “+” represents a value greater than 1000 nM, “++” represents a value greater than 100 and less than or equal to 1000 nM, “+++” represents a value greater than 10 nM and less than or equal to 100 nM, and “++++” represents a value of less than or equal to 10 nM.

TABLE 26B

| | | | | | SJSA-1 | IC₅₀ |
|---|---|---|---|---|---|---|
| SP | IC₅₀ (MDM2) | IC₅₀ (MDMX) | Ki (MDM2) | Ki (MDMX) | EC₅₀ (72 h) | Ratio |
| 449 | ++++ | ++++ | ++++ | ++++ | ++++ | |
| 450 | | | ++ | | +++ | |
| 451 | | | +++ | | +++ | |
| 452 | | | | | + | |
| 456 | | | ++++ | +++ | +++ | |
| 457 | | | ++++ | ++++ | ++++ | |
| 461 | | | | | +++ | |
| 459 | | | + | + | + | |
| 460 | | | + | + | + | |
| 463 | | | | | ++ | |
| 464 | | | | | + | |
| 153 | | | ++++ | +++ | ++++ | 1-29 |
| 465 | | | ++++ | ++++ | | |
| 466 | | | ++++ | ++++ | | |
| 470 | | | ++++ | ++++ | | |
| 916 | +++ | +++ | ++++ | ++++ | ++ | |
| 917 | +++ | +++ | ++++ | +++ | + | |
| 919 | | | | | +++ | |

### Example 12. Cell Viability Assay

[0583] The assay was performed according to the following general protocol:

Cell Plating: Trypsinize, count and seed cells at the pre-determined densities in 96-well plates a day prior to assay. Following cell densities are used for each cell line in use: SJSA-1: 7500 cells/well, RKO: 5000 cells/well, RKO-E6: 5000 cells/well, HCT-116: 5000 cells/well, SW-480: 2000 cells/well, and MCF-7: 5000 cells/well.

[0584] On the day of study, replace media with fresh media with 11% FBS (assay media) at room temperature. Add 180 μL of the assay media per well. Control wells with no cells, receive 200 μl media.

[0585] Peptide dilution: all dilutions are made at room temperature and added to cells at room temperature. Prepare 10 mM stocks of the peptides in DMSO. Serially dilute the stock using 1:3 dilution scheme to get 10, 3.3, 1.1, 0.33, 0.11, 0.03, 0.01 mM solutions using DMSO as diluents. Dilute the serially DMSO-diluted peptides 33.3 times using sterile water. This gives range of 10× working stocks. Also prepare DMSO/sterile water (3% DMSO) mix for control wells. Thus the working stocks concentration range μM will be 300, 100, 30, 10, 3, 1, 0.3 and 0 μM. Mix well at each dilution step using multichannel. Row H has controls. H1-H3 will receive 20 μl of assay media. H4-H9 will receive 20 μl of 3% DMSO-water vehicle. H10-H12 will have media alone control with no cells. Positive control: HDM2 small molecule inhibitor, Nutlin-3a (10 mM) is used as positive control. Nutlin was diluted using the same dilution scheme as peptides.

[0586] Addition of working stocks to cells: Add 20 μl of 10× desired concentration to appropriate well to achieve the final concentrations in total 200 μl volume in well. (20 μl of 300 μM peptide+180 μl of cells in media=30 μM final concentration in 200 μl volume in wells). Mix gently a few times using pipette. Thus final concentration range used will be 30, 10, 3, 1, 0.3, 0.1, 0.03 & 0 μM (for potent peptides further dilutions are included). Controls include wells that get no peptides but contain the same concentration of DMSO as the wells containing the peptides, and wells containing NO CELLS. Incubate for 72 hours at 37° C. in humidified 5% CO₂ atmosphere. The viability of cells is determined using MTT reagent from Promega. Viability of SJSA-1, RKO, RKO-E6, HCT-116 cells is determined on day 3, MCF-7 cells on day 5 and SW-480 cells on day 6. At the end of designated incubation time, allow the plates to come to room temperature. Remove 80 μl of assay media from each well. Add 15 μl of thawed MTT reagent to each well. Allow plate to incubate for 2 h at 37° C. in humidified 5% CO₂ atmosphere and add 100 μl solubilization reagent as per manufacturer's protocol. Incubate with agitation for 1h at room temperature and read on Synergy Biotek multiplate reader for absorbance at 570 nM. Analyze the cell viability against the DMSO controls using GraphPad PRISM analysis tools. Reagents: Invitrogen cell culture Media, Falcon 96-well clear cell culture treated plates (Nunc 353072), DMSO (Sigma D 2650), RPMI 1640 (Invitrogen 72400), and MTT (Promega G4000). Instruments: Multiplate Reader for Absorbance readout (Synergy 2).

[0587] Results from Examples 4 and 5 are provided in SJSA-1 EC₅₀ data in FIGS. 6A-D.

[0588] Results from cell viability assays are shown in Tables 27 and 28. The following scale is used: “+” represents a value greater than 30 μM, “++” represents a value greater than 15 μM and less than or equal to 30 μM, “+++” represents a value greater than 5 μM and less than or equal to 15 μM, and “++++” represents a value of less than or equal to 5 μM. “IC50 ratio” represents the ratio of average IC50 in p53+/+ cells relative to average IC50 in p53−/− cells.

TABLE 27

| SP# | SJSA-1 EC₅₀ (72 h) |
|---|---|
| 3 | +++ |
| 4 | +++ |
| 5 | ++++ |
| 6 | ++ |
| 7 | ++++ |
| 8 | +++ |
| 9 | +++ |
| 10 | +++ |
| 11 | ++++ |
| 12 | ++ |
| 13 | +++ |
| 14 | + |
| 15 | ++ |
| 16 | + |
| 17 | + |
| 18 | + |
| 19 | ++ |
| 20 | + |
| 21 | + |
| 22 | + |
| 24 | +++ |
| 26 | ++++ |
| 28 | + |
| 29 | + |
| 30 | + |
| 32 | ++ |
| 38 | + |
| 39 | + |
| 40 | + |
| 41 | + |
| 42 | + |
| 43 | ++ |
| 45 | + |
| 46 | + |
| 47 | + |
| 48 | + |
| 49 | +++ |
| 50 | ++++ |
| 52 | + |
| 54 | + |
| 55 | + |
| 65 | ++++ |
| 68 | ++++ |
| 69 | ++++ |
| 70 | ++++ |
| 71 | ++++ |
| 72 | ++++ |
| 74 | ++++ |
| 75 | ++++ |
| 77 | ++++ |
| 78 | ++ |
| 80 | ++++ |
| 81 | +++ |
| 82 | +++ |
| 83 | +++ |
| 84 | + |
| 85 | +++ |
| 99 | ++++ |
| 102 | +++ |
| 103 | +++ |
| 104 | +++ |
| 105 | +++ |
| 108 | +++ |
| 109 | +++ |
| 110 | +++ |
| 111 | ++ |
| 114 | ++++ |
| 115 | ++++ |
| 118 | ++++ |
| 120 | ++++ |
| 121 | ++++ |
| 122 | ++++ |
| 123 | ++++ |
| 124 | +++ |
| 125 | ++++ |
| 126 | ++++ |
| 127 | ++++ |
| 128 | +++ |
| 129 | ++ |
| 130 | ++++ |
| 131 | +++ |
| 132 | ++++ |
| 133 | +++ |
| 134 | +++ |
| 135 | +++ |
| 136 | ++ |
| 137 | +++ |
| 139 | ++++ |
| 142 | +++ |
| 144 | ++++ |
| 147 | ++++ |
| 148 | ++++ |
| 149 | ++++ |
| 150 | ++++ |
| 152 | +++ |
| 153 | ++++ |
| 154 | ++++ |
| 155 | ++ |
| 156 | +++ |
| 157 | +++ |
| 158 | +++ |
| 160 | ++++ |
| 161 | ++++ |
| 162 | +++ |
| 163 | +++ |
| 166 | ++ |
| 167 | +++ |
| 168 | ++ |
| 169 | ++++ |
| 170 | ++++ |
| 171 | ++ |
| 173 | +++ |
| 174 | ++++ |
| 175 | +++ |
| 176 | +++ |
| 177 | ++++ |
| 179 | +++ |
| 180 | +++ |
| 181 | +++ |
| 182 | ++++ |
| 183 | ++++ |
| 184 | +++ |
| 185 | +++ |
| 186 | ++ |
| 188 | ++ |
| 190 | ++++ |
| 192 | +++ |
| 193 | ++ |
| 194 | + |
| 195 | ++++ |
| 196 | ++++ |
| 197 | ++++ |
| 198 | ++ |
| 199 | +++ |
| 200 | +++ |
| 201 | ++++ |
| 202 | +++ |
| 203 | ++++ |
| 204 | ++++ |
| 205 | ++ |
| 206 | ++ |
| 207 | +++ |
| 208 | +++ |
| 209 | ++++ |
| 210 | +++ |
| 211 | ++++ |
| 213 | ++++ |
| 214 | ++++ |
| 215 | ++++ |
| 216 | ++++ |
| 217 | ++++ |
| 218 | ++++ |
| 219 | ++++ |
| 220 | +++ |
| 221 | ++++ |
| 222 | +++ |
| 223 | ++++ |
| 224 | ++ |
| 225 | +++ |
| 226 | ++ |
| 227 | +++ |
| 228 | ++++ |
| 229 | ++++ |
| 230 | ++++ |
| 231 | ++++ |
| 232 | ++++ |
| 233 | ++++ |
| 234 | ++++ |
| 235 | ++++ |
| 236 | ++++ |
| 237 | ++++ |
| 238 | ++++ |
| 239 | +++ |
| 240 | ++ |
| 241 | +++ |
| 242 | ++++ |
| 243 | ++++ |
| 244 | ++++ |
| 245 | ++++ |
| 246 | +++ |
| 247 | ++++ |
| 248 | ++++ |
| 249 | ++++ |
| 250 | ++ |
| 251 | + |
| 252 | + |
| 253 | + |
| 254 | +++ |
| 255 | +++ |
| 256 | ++ |
| 257 | +++ |
| 258 | +++ |
| 259 | ++ |
| 260 | ++ |
| 261 | ++ |
| 262 | +++ |
| 263 | ++ |
| 264 | ++++ |
| 266 | +++ |
| 267 | ++++ |
| 270 | ++ |
| 271 | ++ |
| 272 | ++ |
| 276 | ++ |
| 277 | ++ |
| 278 | ++ |
| 279 | ++++ |
| 280 | +++ |
| 281 | ++ |
| 282 | ++ |
| 283 | ++ |
| 284 | ++++ |
| 289 | ++++ |
| 290 | +++ |
| 291 | ++++ |
| 292 | ++++ |
| 293 | ++++ |
| 294 | ++++ |
| 295 | +++ |
| 296 | ++++ |
| 297 | +++ |
| 298 | ++++ |
| 300 | ++++ |
| 301 | ++++ |
| 302 | ++++ |
| 303 | ++++ |
| 304 | ++++ |
| 305 | ++++ |
| 306 | ++++ |
| 307 | +++ |
| 308 | ++++ |
| 309 | +++ |
| 310 | ++++ |
| 312 | ++++ |
| 313 | ++++ |
| 314 | ++++ |
| 315 | ++++ |
| 316 | ++++ |
| 317 | ++++ |
| 318 | ++++ |
| 319 | ++++ |
| 320 | ++++ |
| 321 | ++++ |
| 322 | ++++ |
| 323 | ++++ |
| 324 | ++++ |
| 326 | ++++ |
| 327 | ++++ |
| 328 | ++++ |
| 329 | ++++ |
| 330 | ++++ |
| 331 | ++++ |
| 332 | ++++ |
| 333 | ++ |
| 334 | +++ |
| 335 | ++++ |
| 336 | ++++ |
| 337 | ++++ |
| 338 | ++++ |
| 339 | ++++ |
| 340 | ++++ |
| 341 | ++++ |
| 342 | ++++ |
| 343 | ++++ |
| 344 | ++++ |
| 345 | ++++ |
| 346 | ++++ |
| 347 | ++++ |
| 348 | ++++ |
| 349 | ++++ |
| 350 | ++++ |
| 351 | ++++ |
| 352 | ++++ |
| 353 | ++++ |
| 355 | ++++ |
| 357 | ++++ |
| 358 | ++++ |
| 359 | ++++ |
| 360 | ++++ |
| 361 | +++ |
| 362 | ++++ |
| 363 | ++++ |
| 364 | ++++ |
| 365 | +++ |
| 366 | ++++ |
| 367 | ++++ |
| 368 | + |
| 369 | ++++ |
| 370 | ++++ |
| 371 | ++++ |
| 372 | +++ |
| 373 | +++ |
| 374 | ++++ |
| 375 | ++++ |
| 376 | ++++ |
| 377 | ++++ |
| 378 | ++++ |
| 379 | ++++ |
| 380 | ++++ |
| 381 | ++++ |
| 382 | ++++ |
| 386 | +++ |
| 388 | ++ |
| 390 | ++++ |
| 392 | +++ |
| 394 | +++ |
| 396 | +++ |
| 398 | +++ |
| 402 | +++ |
| 404 | +++ |
| 408 | ++++ |
| 410 | +++ |
| 411 | +++ |
| 412 | + |
| 421 | +++ |
| 423 | ++++ |
| 425 | ++++ |
| 427 | ++++ |
| 434 | +++ |
| 435 | ++++ |
| 436 | ++++ |
| 437 | ++++ |
| 438 | ++++ |
| 439 | ++++ |
| 440 | ++++ |
| 441 | ++++ |
| 442 | ++++ |
| 443 | ++++ |
| 444 | +++ |
| 445 | ++++ |
| 449 | ++++ |
| 551 | ++++ |
| 552 | ++++ |
| 554 | + |
| 555 | ++++ |
| 557 | ++++ |
| 558 | ++++ |
| 560 | + |
| 561 | ++++ |
| 562 | ++++ |
| 563 | ++++ |
| 564 | ++++ |
| 566 | ++++ |
| 567 | ++++ |
| 568 | +++ |
| 569 | ++++ |
| 571 | ++++ |
| 572 | ++++ |
| 573 | ++++ |
| 574 | ++++ |
| 575 | ++++ |
| 576 | ++++ |
| 577 | ++++ |
| 578 | ++++ |
| 585 | ++++ |
| 586 | ++++ |
| 587 | ++++ |
| 588 | ++++ |
| 589 | +++ |
| 432 | ++++ |
| 672 | + |
| 673 | ++ |
| 682 | + |
| 686 | + |
| 687 | + |
| 662 | ++++ |
| 663 | ++++ |
| 553 | +++ |
| 559 | ++++ |
| 579 | ++++ |
| 581 | ++++ |
| 582 | ++ |
| 582 | ++++ |
| 584 | +++ |
| 675 | ++++ |
| 676 | ++++ |
| 677 | + |
| 679 | ++++ |
| 700 | +++ |
| 704 | +++ |
| 591 | + |
| 706 | ++ |
| 695 | ++ |
| 595 | ++++ |
| 596 | ++++ |
| 597 | +++ |
| 598 | +++ |
| 599 | ++++ |
| 600 | ++++ |
| 601 | +++ |
| 602 | +++ |
| 603 | +++ |
| 604 | +++ |
| 606 | ++++ |
| 607 | ++++ |
| 608 | ++++ |
| 610 | ++++ |
| 611 | ++++ |
| 612 | ++++ |
| 613 | +++ |
| 614 | +++ |
| 615 | ++++ |
| 618 | ++++ |
| 619 | ++++ |
| 707 | ++++ |
| 620 | ++++ |
| 621 | ++++ |
| 622 | ++++ |
| 623 | ++++ |
| 624 | ++++ |
| 625 | ++++ |
| 626 | +++ |
| 631 | ++++ |
| 633 | ++++ |
| 634 | ++++ |
| 635 | +++ |
| 636 | +++ |
| 638 | + |
| 641 | +++ |
| 665 | ++++ |
| 708 | ++++ |
| 709 | +++ |
| 710 | + |
| 711 | ++++ |
| 712 | ++++ |
| 713 | ++++ |
| 714 | +++ |
| 715 | +++ |
| 716 | ++++ |
| 765 | + |
| 753 | + |
| 754 | + |
| 755 | + |
| 756 | + |
| 757 | ++++ |
| 758 | +++ |

TABLE 28

| | HCT-116 | RKO | RKO-E6 | SW480 | |
|---|---|---|---|---|---|
| | EC₅₀ | EC₅₀ | EC₅₀ | EC₅₀ | EC₅₀ |
| SP# | (72 h) | (72 h) | (72 h) | (6 days) | Ratio |
| 4 | ++++ | ++++ | +++ | ++++ | |
| 5 | ++++ | ++++ | +++ | ++++ | |
| 7 | ++++ | ++++ | +++ | ++++ | |
| 10 | ++++ | +++ | +++ | +++ | |
| 11 | ++++ | ++++ | ++ | +++ | |
| 50 | ++++ | ++++ | ++ | +++ | |
| 65 | +++ | +++ | +++ | +++ | |
| 69 | ++++ | ++++ | + | ++++ | |
| 70 | ++++ | ++++ | ++ | +++ | |
| 71 | ++++ | ++++ | +++ | +++ | |
| 81 | +++ | +++ | +++ | +++ | |
| 99 | ++++ | ++++ | +++ | ++++ | |
| 109 | ++++ | ++++ | ++ | +++ | |
| 114 | | +++ | + | +++ | |
| 115 | | +++ | + | +++ | 1-29 |
| 118 | +++ | ++++ | + | ++++ | |
| 120 | ++++ | ++++ | + | ++++ | |
| 121 | ++++ | ++++ | + | ++++ | |
| 122 | | +++ | + | +++ | 1-29 |
| 125 | +++ | +++ | + | + | |
| 126 | + | + | + | + | |
| 148 | | ++ | + | + | |
| 150 | | ++ | + | + | |
| 153 | +++ | | + | | |
| 154 | +++ | +++ | + | + | 30-49 |
| 158 | + | + | + | + | |
| 160 | +++ | + | + | + | 1-29 |
| 161 | +++ | + | + | + | |
| 175 | + | + | + | + | |
| 196 | ++++ | ++++ | +++ | ++++ | |
| 219 | ++++ | +++ | + | + | 1-29 |
| 233 | ++++ | | | | |
| 237 | ++++ | | + | + | |
| 238 | ++++ | | + | + | |
| 243 | ++++ | | + | + | |
| 244 | ++++ | | + | + | ≧50 |
| 245 | ++++ | | + | + | |
| 247 | ++++ | | + | + | |
| 249 | ++++ | ++++ | + | + | ≧50 |
| 255 | ++++ | | + | | |
| 291 | | | + | | |
| 293 | +++ | | + | | |
| 303 | +++ | | + | | 1-29 |
| 305 | | | + | | |
| 306 | ++++ | | + | | |
| 310 | ++++ | | + | | |
| 312 | ++++ | | | | |
| 313 | ++++ | | ++ | | |
| 314 | | | + | | |
| 315 | ++++ | ++++ | ++ | ++++ | ≧50 |
| 316 | ++++ | ++++ | + | +++ | ≧50 |
| 317 | +++ | | + | ++ | |
| 321 | ++++ | | + | | |
| 324 | +++ | | + | | |
| 325 | +++ | | | | |
| 326 | +++ | | + | | |
| 327 | +++ | | + | | |
| 328 | +++ | | ++ | | |
| 329 | ++++ | | + | | |
| 330 | | | + | | |
| 331 | ++++ | ++++ | + | + | ≧50 |
| 338 | ++++ | ++++ | ++ | +++ | |
| 341 | +++ | ++ | + | + | |
| 343 | +++ | | + | + | |
| 346 | ++++ | | + | + | |
| 347 | +++ | | + | + | |
| 349 | ++++ | +++ | + | + | 30-49 |
| 350 | ++++ | | + | + | |
| 351 | ++++ | +++ | + | + | 30-49 |
| 353 | ++ | ++ | + | + | |
| 355 | ++++ | ++ | + | + | 1-29 |
| 357 | ++++ | ++++ | + | + | |
| 358 | ++++ | ++ | + | + | |
| 359 | ++++ | ++ | + | + | |
| 367 | ++++ | | + | + | 30-49 |
| 386 | ++++ | ++++ | ++++ | ++++ | |
| 388 | ++ | ++ | + | +++ | 1-29 |
| 390 | ++++ | ++++ | +++ | ++++ | |
| 435 | +++ | ++ | + | | |
| 436 | ++++ | ++++ | ++ | | |
| 437 | ++++ | ++++ | ++ | ++++ | 30-49 |
| 440 | ++ | ++ | + | | |
| 442 | ++++ | ++++ | ++ | | |
| 444 | ++++ | ++++ | +++ | | |
| 445 | ++++ | +++ | + | + | ≧50 |
| 555 | | | | | ≧50 |
| 557 | | | | | ≧50 |
| 558 | | | | | 30-49 |
| 562 | | | | | 30-49 |
| 564 | | | | | 30-49 |
| 566 | | | | | 30-49 |
| 567 | | | | | ≧50 |
| 572 | | | | | ≧50 |
| 573 | | | | | 30-49 |
| 578 | | | | | 30-49 |
| 662 | | | | | ≧50 |
| 379 | | | | | 1-29 |
| 375 | | | | | 1-29 |
| 559 | | | | | ≧50 |
| 561 | | | | | 1-29 |
| 563 | | | | | 1-29 |
| 568 | | | | | 1-29 |
| 569 | | | | | 1-29 |
| 571 | | | | | 1-29 |
| 574 | | | | | 1-29 |
| 575 | | | | | 1-29 |
| 576 | | | | | 1-29 |
| 577 | | | | | 30-49 |
| 433 | | | | | 1-29 |
| 551 | | | | | 30-49 |
| 553 | | | | | 1-29 |
| 710 | | | | + | |
| 711 | | | | + | |
| 712 | | | | ++ | |
| 713 | | | | ++ | |
| 714 | | | | +++ | |
| 715 | | | | +++ | |
| 716 | | | | + | |

### Example 13. P21 ELISA Assay

[0589] The assay was performed according to the following general protocol:

Cell Plating: Trypsinize, count and seed SJSA1 cells at the density of 7500 cells/100 μl/well in 96-well plates a day prior to assay. On the day of study, replace media with fresh RPMI-11% FBS (assay media). Add 90 μL of the assay media per well. Control wells with no cells, receive 100 μl media.

[0590] Peptide dilution: Prepare 10 mM stocks of the peptides in DMSO. Serially dilute the stock using 1:3 dilution scheme to get 10, 3.3, 1.1, 0.33, 0.11, 0.03, 0.01 mM solutions using DMSO as diluents. Dilute the serially DMSO-diluted peptides 33.3 times using sterile water. This gives range of 10× working stocks. Also prepare DMSO/sterile water (3% DMSO) mix for control wells. Thus the working stocks concentration range μM will be 300, 100, 30, 10, 3, 1, 0.3 and 0 μM. Mix well at each dilution step using multichannel. Row H has controls. H1-H3 will receive 10 μl of assay media. H4-H9 will receive 10 μl of 3% DMSO-water vehicle. H10-H12 will have media alone control with no cells. Positive control: HDM2 small molecule inhibitor, Nutlin-3a (10 mM) is used as positive control. Nutlin was diluted using the same dilution scheme as peptides.

[0591] Addition of working stocks to cells: Add 10 μl of 10× desired concentration to appropriate well to achieve the final concentrations in total 100 μl volume in well. (10 μl of 300 μM peptide+90 μl of cells in media=30 μM final concentration in 100 μl volume in wells). Thus final concentration range used will be 30, 10, 3, 1, 0.3 & 0 μM. Controls will include wells that get no peptides but contain the same concentration of DMSO as the wells containing the peptides, and wells containing NO CELLS. 20 h-post incubation, aspirate the media; wash cells with 1×PBS (without Ca⁺⁺/Mg⁺⁺) and lyse in 60 μl of 1× Cell lysis buffer (Cell Signaling technologies 10× buffer diluted to 1× and supplemented with protease inhibitors and Phosphatase inhibitors) on ice for 30 min. Centrifuge plates in at 5000 rpm speed in at 4° C. for 8 min; collect clear supernatants and freeze at −80° C. until further use.

[0592] Protein Estimation: Total protein content of the lysates is measured using BCA protein detection kit and BSA standards from Thermofisher. Typically, about 6-7 μg protein is expected per well. Use 50 μl of the lysate per well to set up p21 ELISA. Human Total p21 ELISA: The ELISA assay protocol is followed as per the manufacturer's instructions. 50 μl lysate is used for each well, and each well is set up in triplicate. Reagents: Cell-Based Assay (−)-Nutlin-3 (10 mM): Cayman Chemicals—catalog #600034, OptiMEM, Invitrogen catalog #51985, Cell Signaling Lysis Buffer (10×), Cell signaling technology—catalog #9803, Protease inhibitor Cocktail tablets(mini), Roche Chemicals—catalog #04693124001, Phosphatase inhibitor Cocktail tablet, Roche Chemicals—catalog #04906837001, Human total p21 ELISA kit, R&D Systems, DYC1047-5, and STOP Solution (1 M HCl), Cell Signaling Technologies—catalog #7002. Instruments: Micro centrifuge—Eppendorf 5415D and Multiplate Reader for Absorbance readout (Synergy 2). Results from Example 13 are provided in p21 data in FIGS. 6A-D.

### Example 14. Caspase 3 Detection Assay

[0593] The assay was performed according to the following general protocol.

[0594] Cell Plating: Trypsinize, count and seed SJSA1 cells at the density of 7500 cells/100 μl/well in 96-well plates a day prior to assay. On the day of study, replace media with fresh RPMI-11% FBS (assay media). Add 180 μL of the assay media per well. Control wells with no cells, receive 200 μl media.

[0595] Peptide Dilution:
[0596] Prepare 10 mM stocks of the peptides in DMSO. Serially dilute the stock using 1:3 dilution scheme to get 10, 3.3, 1.1, 0.33, 0.11, 0.03, 0.01 mM solutions using DMSO as diluents. Dilute the serially DMSO-diluted peptides 33.3 times using sterile water. This gives range of 10× working stocks. Also prepare DMSO/sterile water (3% DMSO) mix for control wells.
[0597] Thus, the working stocks concentration range μM will be 300, 100, 30, 10, 3, 1, 0.3 and 0 μM. Mix well at each dilution step using multichannel. Add 20 μl of 10× working stocks to appropriate wells.
[0598] Row H has controls. H1-H3 will receive 20 μl of assay media. H4-H9 will receive 20 μl of 3% DMSO-water vehicle. H10-H12 will have media alone control with no cells.
[0599] Positive control: HDM2 small molecule inhibitor, Nutlin-3a (10 mM) is used as positive control. Nutlin was diluted using the same dilution scheme as peptides.

[0600] Addition of working stocks to cells:
[0601] Add 10 μl of 10× desired concentration to appropriate well to achieve the final concentrations in total 100 μl volume in well. (10 μl of 300 μM peptide+90 μl of cells in media=30 μM final concentration in 100 μl volume in wells). Thus final concentration range used will be 30, 10, 3, 1, 0.3 & 0 μM.
[0602] Controls will include wells that get no peptides but contain the same concentration of DMSO as the wells containing the peptides, and wells containing NO CELLS.
[0603] 48 h-post incubation, aspirate 80 μl media from each well; add 100 μl Caspase3/7Glo assay reagent (Promega Caspase 3/7 glo assay system, G8092) per well, incubate with gentle shaking for 1 h at room temperature. Read on Synergy Biotek multiplate reader for luminescence. Data is analyzed as Caspase 3 activation over DMSO-treated cells.

[0604] Results from Examples 13 and 14 are provided in p21 data in FIGS. 6A-D and Table 29.

TABLE 29

| | caspase | caspase | caspase | caspase | caspase | p21 | p21 | p21 | p21 | p21 |
|---|---|---|---|---|---|---|---|---|---|---|
| SP# | 0.3 uM | 1 uM | 3 uM | 10 uM | 30 uM | 0.3 uM | 1 uM | 3 uM | 10 uM | 30 uM |
| 4 | | | 9 | 37 | 35 | | | 317 | 3049 | 3257 |
| 7 | 0.93 | 1.4 | 5.08 | 21.7 | 23.96 | | 18 | 368 | 1687 | 2306 |
| 8 | | | 1 | 19 | 25 | | | 34 | 972 | 2857 |
| 10 | 1 | | 1 | 17 | 32 | | 10 | 89 | 970 | 2250 |
| 11 | 1 | | 5 | 23 | 33.5 | | 140 | 350 | 2075.5 | 3154 |
| 26 | 1 | | 1 | 3 | 14 | | | | | |
| 50 | | | 8 | 29 | 29 | | 44 | 646 | 1923 | 1818 |
| 65 | 1 | | 6 | 28 | 34 | −69 | −24 | 122 | 843 | 1472 |
| 69 | 4.34 | 9.51 | 16.39 | 26.59 | 26.11 | 272 | 458.72 | 1281.39 | 2138.88 | 1447.22 |
| 70 | | | 1 | 9 | 26 | | −19 | 68 | 828 | 1871 |
| 71 | 0.95 | 1.02 | 3.68 | 14.72 | 23.52 | | 95 | 101 | 1204 | 2075 |
| 72 | 1 | | 1 | 4 | 10 | −19 | 57 | 282 | 772 | 1045 |
| 77 | 1 | | 2 | 19 | 23 | | | | | |
| 80 | 1 | | 2 | 13 | 20 | | | | | |
| 81 | 1 | | 1 | 6 | 21 | | 0 | 0 | 417 | 1649 |
| 99 | 1 | | 7 | 31 | 33 | −19 | 117 | 370 | 996 | 1398 |
| 109 | | | 4 | 16 | 25 | | 161 | 445 | 1221 | 1680 |
| 114 | 1 | | 6 | 28 | 34 | −21 | 11 | 116 | 742 | 910 |
| 115 | 1 | | 10 | 26 | 32 | −10 | 36 | 315 | 832 | 1020 |
| 118 | 1 | | 2 | 18 | 27 | −76 | −62 | −11 | 581 | 1270 |
| 120 | 2 | | 11 | 20 | 30 | −4 | 30 | 164 | 756 | 1349 |
| 121 | 1 | | 5 | 19 | 30 | 9 | 33 | 81 | 626 | 1251 |
| 122 | 1 | | 2 | 15 | 30 | −39 | −18 | 59 | 554 | 1289 |
| 123 | 1 | | 1 | 6 | 14 | | | | | |
| 125 | 1 | | 3 | 9 | 29 | 50 | 104 | 196 | 353 | 1222 |
| 126 | 1 | | 1 | 6 | 30 | −47 | −10 | 90 | 397 | 1443 |
| 127 | 1 | | 1 | 4 | 13 | | | | | |
| 130 | 1 | | 2 | 6 | 17 | | | | | |
| 139 | 1 | | 2 | 9 | 18 | | | | | |
| 142 | 1 | | 2 | 15 | 20 | | | | | |
| 144 | 1 | | 4 | 10 | 16 | | | | | |
| 148 | 1 | | 11 | 23 | 31 | −23 | 55 | 295 | 666 | 820 |
| 149 | 1 | | 2 | 4 | 10 | 35 | 331 | 601 | 1164 | 1540 |
| 150 | 2 | | 11 | 19 | 35 | −37 | 24 | 294 | 895 | 906 |
| 153 | 2 | | 10 | 15 | 20 | | | | | |
| 154 | 2.68 | 4 | 13.93 | 19.86 | 30.14 | 414.04 | 837.45 | 1622.42 | 2149.51 | 2156.98 |
| 158 | 1 | | 1.67 | 5 | 16.33 | −1.5 | 95 | 209.5 | 654 | 1665.5 |
| 160 | 2 | | 10 | 16 | 31 | −43 | 46 | 373 | 814 | 1334 |
| 161 | 2 | | 8 | 14 | 22 | 13 | 128 | 331 | 619 | 1078 |
| 170 | 1 | | 1 | 16 | 20 | | | | | |
| 175 | 1 | | 5 | 12 | 21 | −65 | 1 | 149 | 543 | 1107 |
| 177 | 1 | | 1 | 8 | 20 | | | | | |
| 183 | 1 | | 1 | 4 | 8 | −132 | −119 | −14 | 1002 | 818 |
| 196 | 1 | | 4 | 33 | 26 | −49 | −1 | 214 | 1715 | 687 |
| 197 | 1 | | 1 | 10 | 20 | | | | | |
| 203 | 1 | | 3 | 12 | 10 | 77 | 329 | 534 | 1805 | 380 |
| 204 | 1 | | 4 | 10 | 10 | 3 | 337 | 928 | 1435 | 269 |
| 218 | 1 | | 2 | 8 | 18 | | | | | |
| 219 | 1 | | 5 | 17 | 34 | 28 | 53 | 289 | 884 | 1435 |
| 221 | 1 | | 3 | 6 | 12 | 127 | 339 | 923 | 1694 | 1701 |
| 223 | 1 | | 1 | 5 | 18 | | | | | |
| 230 | 1 | | 2 | 3 | 11 | 245.5 | 392 | 882 | 1549 | 2086 |
| 233 | 6 | 8 | 17 | 22 | 23 | 2000 | 2489 | 3528 | 3689 | 2481 |
| 237 | 1 | | 5 | 9 | 15 | 0 | 0 | 2 | 284 | 421 |
| 238 | 1 | | 2 | 4 | 21 | 0 | 149 | 128 | 825 | 2066 |
| 242 | 1 | | 4 | 5 | 18 | 0 | 0 | 35 | 577 | 595 |
| 243 | 1 | | 2 | 5 | 23 | 0 | 0 | 0 | 456 | 615 |
| 244 | 1 | | 2 | 7 | 17 | 0 | 178 | 190 | 708 | 1112 |
| 245 | 1 | | 3 | 9 | 16 | 0 | 0 | 0 | 368 | 536 |
| 247 | 1 | | 3 | 11 | 24 | 0 | 0 | 49 | 492 | 699 |
| 248 | | | | | | 0 | 50 | 22 | 174 | 1919 |
| 249 | 2 | | 5 | 11 | 23 | 0 | 0 | 100 | 907 | 1076 |
| 251 | | | | | | 0 | 0 | 0 | 0 | 0 |
| 252 | | | | | | 0 | 0 | 0 | 0 | 0 |
| 253 | | | | | | 0 | 0 | 0 | 0 | 0 |
| 254 | 1 | 3 | 7 | 14 | 22 | 118 | 896 | 1774 | 3042 | 3035 |
| 286 | 1 | 4 | 11 | 20 | 22 | 481 | 1351 | 2882 | 3383 | 2479 |
| 287 | 1 | 1 | 3 | 11 | 23 | 97 | 398 | 986 | 2828 | 3410 |
| 315 | 11 | 14.5 | 25.5 | 32 | 34 | 2110 | 2209 | 2626 | 2965 | 2635 |
| 316 | 6.5 | 10.5 | 21 | 32 | 32.5 | 1319 | 1718 | 2848 | 2918 | 2540 |
| 317 | 3 | 4 | 9 | 26 | 35 | 551 | 624 | 776 | 1367 | 1076 |
| 331 | 4.5 | 8 | 11 | 14.5 | 30.5 | 1510 | 1649 | 2027 | 2319 | 2509 |
| 338 | 1 | 5 | 23 | 20 | 29 | 660.37 | 1625.38 | 3365.87 | 2897.62 | 2727 |
| 341 | 3 | 8 | 11 | 14 | 21 | 1325.62 | 1873 | 2039.75 | 2360.75 | 2574 |
| 343 | 1 | 1 | 2 | 5 | 29 | 262 | 281 | 450 | 570 | 1199 |
| 346 | | | | | | 235.86 | 339.82 | 620.36 | 829.32 | 1695.78 |
| 347 | 2 | 3 | 5 | 8 | 29 | 374 | 622 | 659 | 905 | 1567 |
| 349 | 1 | 8 | 11 | 16 | 24 | 1039.5 | 1598.88 | 1983.75 | 2191.25 | 2576.38 |
| 351 | 3 | 9 | 13 | 15 | 24 | 1350.67 | 1710.67 | 2030.92 | 2190.67 | 2668.54 |
| 353 | 1 | 2 | 5 | 7 | 30 | 390 | 490 | 709 | 931 | 1483 |
| 355 | 1 | 4 | 11 | 13 | 30 | 191 | 688 | 1122 | 1223 | 1519 |
| 357 | 2 | 7 | 11 | 15 | 23 | 539 | 777 | 1080 | 1362 | 1177 |
| 358 | 1 | 2 | 3 | 6 | 24 | 252 | 321 | 434 | 609 | 1192 |
| 359 | 3 | 9 | 11 | 13 | 23 | 1163.29 | 1508.79 | 1780.29 | 2067.67 | 2479.29 |
| 416 | | | | | | 33.74 | 39.82 | 56.57 | 86.78 | 1275.28 |
| 417 | | | | | | 0 | 0 | 101.13 | 639.04 | 2016.58 |
| 419 | | | | | | 58.28 | 97.36 | 221.65 | 1520.69 | 2187.94 |
| 432 | | | | | | 54.86 | 68.86 | 105.11 | 440.28 | 1594.4 |

### Example 15. X-Ray Co-Crystallography of Peptidomimetic Macrocycles in Complex with MDMX

[0605] For co-crystallization with peptide 46 (Table 9), a stoichiometric amount of compound from a 100 mM stock solution in DMSO was added to the zebrafish MDMX protein solution and allowed to sit overnight at 4° C. before setting up crystallization experiments. Procedures were similar to those described by Popowicz et al. with some variations, as noted below. Protein (residues 15-129, L46V/V95L) was obtained from an E. coli BL21(DE3) expression system using the pET15b vector. Cells were grown at 37° C. and induced with 1 mM IPTG at an OD₆₀₀ of 0.7. Cells were allowed to grow an additional 18 hr at 23° C. Protein was purified using Ni-NT Agarose followed by Superdex 75 buffered with 50 mM NaPO₄, pH 8.0, 150 mM NaCl, 2 mM TCEP and then concentrated to 24 mg/ml. The buffer was exchanged to 20 mM Tris, pH 8.0, 50 mM NaCl, 2 mM DTT for crystallization experiments. Initial crystals were obtained with the Nextal (Qiagen) AMS screen #94 and the final optimized reservoir was 2.6 M AMS, 75 mM Hepes, pH 7.5. Crystals grew routinely as thin plates at 4° C. and were cryo-protected by pulling them through a solution containing concentrated (3.4 M) malonate followed by flash cooling, storage, and shipment in liquid nitrogen.

[0606] Data collection was performed at the APS at beamline 31-ID (SGX-CAT) at 100 K and wavelength 0.97929 Å. The beamline was equipped with a Rayonix 225-HE detector. For data collection, crystals were rotated through 180° in 1° increments using 0.8 second exposure times. Data were processed and reduced using Mosflm/scala (CCP4; see The CCP4 Suite: Programs for Protein Crystallography. Acta Crystallogr. D 50, 760-763 (1994); P. R. Evans. Joint CCP4 and ESF-EACBM Newsletter 33, 22-24 (1997)) in space group C2 (unit cell: a=109.2786, b=81.0836, c=30.9058 Å, α=90, β=89.8577, γ=90°). Molecular replacement with program Molrep (CCP4; see A. Vagin & A. Teplyakov. J. Appl. Cryst. 30, 1022-1025 (1997)) was perfomed with the MDMX component of the structure determined by Popowicz et al. (2Z5S; see G. M. Popowicz, A. Czarna, U. Rothweiler, A. Szwagierczak, M. Krajewski, L. Weber & T. A. Holak. Cell Cycle 6, 2386-2392 (2007)) and identified two molecules in the asymmetric unit. Initial refinement of just the two molecules of the zebrafish MDMX with program Refmac (CCP4; see G. N. Murshudov, A. A. Vagin & E. J. Dodson. Acta Crystallogr. D 53, 240-255 (1997)) resulted in an R-factor of 0.3424 (R_{free}=0.3712) and rmsd values for bonds (0.018 Å) and angles (1.698°). The electron density for the stapled peptide components, starting with Gln¹⁹ and including the entire aliphatic staple, was very clear. Further refinement with CNX (Accelrys) using data to 2.3 Å resolution resulted in a model (comprised of 1448 atoms from MDMX, 272 atoms from the stapled peptides and 46 water molecules) that is well refined (R_{f}=0.2601, R_{free}=0.3162, rmsd bonds=0.007 Å and rmsd angles=0.916°). Results from Example 15 are shown in FIGS. 3 and 4.

### Example 16. Cell Lysis by Peptidomimetic Macrocycles

[0607] SJSA-1 cells were plated out one day in advance in clear flat-bottom plates (Costar, catalog number 353072) at 7500 cells/well with 100 ul/well of growth media, leaving row H columns 10-12 empty for media alone. On the day of the assay, media was exchanged with RPMI 1% FBS media, 90 μl of media per well.

[0608] 10 mM stock solutions of the peptidomimetic macrocycles were prepared in 100% DMSO. Peptidomimetic macrocycles were then diluted serially in 100% DMSO, and then further diluted 20-fold in sterile water to prepare working stock solutions in 5% DMSO/water of each peptidomimetic macrocycle at concentrations ranging from 500 μM to 62.5 uM.

[0609] 10 μl of each compound was added to the 90 μl of SJSA-1 cells to yield final concentrations of 50 uM to 6.25 uM in 0.5% DMSO-containing media. The negative control (non-lytic) sample was 0.5% DMSO alone and positive control (lytic) samples include 10 uM Melittin and 1% Triton X-100.

[0610] Cell plates were incubated for 1 hour at 37° C. After the 1 hour incubation, the morphology of the cells is examined by microscope and then the plates were centrifuged at 1200 rpm for 5 minutes at room temperature. 40 μl of supernatant for each peptidomimetic macrocyle and control sample is transferred to clear assay plates. LDH release is measured using the LDH cytotoxicity assay kit from Caymen, catalog#1000882. Results are shown in Table 30.

TABLE 30

| | 6.25 uM % | 12.5 uM % | 25 uM % | 50 uM % |
|---|---|---|---|---|
| | Lysed cells | Lysed cells | Lysed cells | Lysed cells |
| SP# | (1 h LDH) | (1 h LDH) | (1 h LDH) | (1 h LDH) |
| 3 | 1 | 0 | 1 | 3 |
| 4 | −2 | 1 | 1 | 2 |
| 6 | 1 | 1 | 1 | 1 |
| 7 | 0 | 0 | 0 | 0 |
| 8 | −1 | 0 | 1 | 1 |
| 9 | −3 | 0 | 0 | 2 |
| 11 | −2 | 1 | 2 | 3 |
| 15 | 1 | 2 | 2 | 5 |
| 18 | 0 | 1 | 2 | 4 |
| 19 | 2 | 2 | 3 | 21 |
| 22 | 0 | −1 | 0 | 0 |
| 26 | 2 | 5 | −1 | 0 |
| 32 | 0 | 0 | 2 | 0 |
| 39 | 0 | −1 | 0 | 3 |
| 43 | 0 | 0 | −1 | −1 |
| 55 | 1 | 5 | 9 | 13 |
| 65 | 0 | 0 | 0 | 2 |
| 69 | 1 | 0.5 | −0.5 | 5 |
| 71 | 0 | 0 | 0 | 0 |
| 72 | 2 | 1 | 0 | 3 |
| 75 | −1 | 3 | 1 | 1 |
| 77 | −2 | −2 | 1 | −1 |
| 80 | 0 | 1 | 1 | 5 |
| 81 | 1 | 1 | 0 | 0 |
| 82 | 0 | 0 | 0 | 1 |
| 99 | 1.5 | 3 | 2 | 3.5 |
| 108 | 0 | 0 | 0 | 1 |
| 114 | 3 | −1 | 4 | 9 |
| 115 | 0 | 1 | −1 | 6 |
| 118 | 4 | 2 | 2 | 4 |
| 120 | 0 | −1 | 0 | 6 |
| 121 | 1 | 0 | 1 | 7 |
| 122 | 1 | 3 | 0 | 6 |
| 123 | −2 | 2 | 5 | 3 |
| 125 | 0 | 1 | 0 | 2 |
| 126 | 1 | 2 | 1 | 1 |
| 130 | 1 | 3 | 0 | −1 |
| 139 | −2 | −3 | −1 | −1 |
| 142 | 1 | 0 | 1 | 3 |
| 144 | 1 | 2 | −1 | 2 |
| 147 | 8 | 9 | 16 | 55 |
| 148 | 0 | 1 | −1 | 0 |
| 149 | 6 | 7 | 7 | 21 |
| 150 | −1 | −2 | 0 | 2 |
| 153 | 4 | 3 | 2 | 3 |
| 154 | −1 | −1.5 | −1 | −1 |
| 158 | 0 | −6 | −2 | |
| 160 | −1 | 0 | −1 | 1 |
| 161 | 1 | 1 | −1 | 0 |
| 169 | 2 | 3 | 3 | 7 |
| 170 | 2 | 2 | 1 | −1 |
| 174 | 5 | 3 | 2 | 5 |
| 175 | 3 | 2 | 1 | 0 |
| 177 | −1 | −1 | 0 | 1 |
| 182 | 0 | 2 | 3 | 6 |
| 183 | 2 | 1 | 0 | 3 |
| 190 | −1 | −1 | 0 | 1 |
| 196 | 0 | −2 | 0 | 3 |
| 197 | 1 | −4 | −1 | −2 |
| 203 | 0 | −1 | 2 | 2 |
| 204 | 4 | 3 | 2 | 0 |
| 211 | 5 | 4 | 3 | 1 |
| 217 | 2 | 1 | 1 | 2 |
| 218 | 0 | −3 | −4 | 1 |
| 219 | 0 | 0 | −1 | 2 |
| 221 | 3 | 3 | 3 | 11 |
| 223 | −2 | −2 | −4 | −1 |
| 230 | 0.5 | −0.5 | 0 | 3 |
| 232 | 6 | 6 | 5 | 5 |
| 233 | 2.5 | 4.5 | 3.5 | 6 |
| 237 | 0 | 3 | 7 | 55 |
| 243 | 4 | 23 | 39 | 64 |
| 244 | 0 | 1 | 0 | 4 |
| 245 | 1 | 14 | 11 | 56 |
| 247 | 0 | 0 | 0 | 4 |
| 249 | 0 | 0 | 0 | 0 |
| 254 | 11 | 34 | 60 | 75 |
| 279 | 6 | 4 | 5 | 6 |
| 280 | 5 | 4 | 6 | 18 |
| 284 | 5 | 4 | 5 | 6 |
| 286 | 0 | 0 | 0 | 0 |
| 287 | 0 | 6 | 11 | 56 |
| 316 | 0 | 1 | 0 | 1 |
| 317 | 0 | 1 | 0 | 0 |
| 331 | 0 | 0 | 0 | 0 |
| 335 | 0 | 0 | 0 | 1 |
| 336 | 0 | 0 | 0 | 0 |
| 338 | 0 | 0 | 0 | 1 |
| 340 | 0 | 2 | 0 | 0 |
| 341 | 0 | 0 | 0 | 0 |
| 343 | 0 | 1 | 0 | 0 |
| 347 | 0 | 0 | 0 | 0 |
| 349 | 0 | 0 | 0 | 0 |
| 351 | 0 | 0 | 0 | 0 |
| 353 | 0 | 0 | 0 | 0 |
| 355 | 0 | 0 | 0 | 0 |
| 357 | 0 | 0 | 0 | 0 |
| 359 | 0 | 0 | 0 | 0 |
| 413 | 5 | 3 | 3 | 3 |
| 414 | 3 | 3 | 2 | 2 |
| 415 | 4 | 4 | 2 | 2 |

### Example 17. MCF-7 Breast Cancer Study Using SP315, SP249 and SP154

[0611] A xenograft study was performed to test the efficacy of SP315, SP249 and SP154 in inhibiting tumor growth in athymic mice in the MCF-7 breast cancer xenograft model. A negative control stapled peptide. SP252, a point mutation of SP154 (F to A at position 19) was also tested in one group; this peptide had shown no activity in the SJSA-1 in vitro viability assay. Slow release 90 day 0.72 mg 17β-estradiol pellets (Innovative Research, Sarasota, Fla.) were implanted subcutaneously (sc) on the nape of the neck one day prior to tumor cell implantation (Day −1). On Day 0, MCF-7 tumor cells were implanted sc in the flank of female nude (Crl:NU-Foxn1nu) mice. On Day 18, the resultant sc tumors were measured using calipers to determine their length and width and the mice were weighed. The tumor sizes were calculated using the formula (length×width²)/2 and expressed as cubic millimeters (mm³). Mice with tumors smaller than 85.3 mm³ or larger than 417.4 mm³ were excluded from the subsequent group formation. Thirteen groups of mice, 10 mice per group, were formed by randomization such that the group mean tumor sizes were essentially equivalent (mean of groups±standard deviation of groups=180.7±17.5 mm³).

[0612] SP315, SP249, SP154 and SP252 dosing solutions were prepared from peptides formulated in a vehicle containing MPEG(2K)-DSPE at 50 mg/mL concentration in a 10 mM Histidine buffered saline at pH 7. This formulation was prepared once for the duration of the study. This vehicle was used as the vehicle control in the subsequent study.

[0613] Each group was assigned to a different treatment regimen. Group 1, as the vehicle negative control group, received the vehicle administered at 8 mL/kg body weight intravenously (iv) three times per week from Days 18-39. Groups 2 and 3 received SP154 as an iv injection at 30 mg/kg three times per week or 40 mg/kg twice a week, respectively. Group 4 received 6.7 mg/kg SP249 as an iv injection three times per week. Groups 5, 6, 7 and 8 received SP315 as an iv injection of 26.7 mg/kg three times per week, 20 mg/kg twice per week, 30 mg/kg twice per week, or 40 mg/kg twice per week, respectively. Group 9 received 30 mg/kg SP252 as an iv injection three times per week.

[0614] During the dosing period the mice were weighed and tumors measured 1-2 times per week. Results in terms of tumor volume are shown in FIGS. 8-11 and tumor growth inhibition compared with the vehicle group, body weight change and number of mice with ≧20% body weight loss or death are shown in Table 31. Tumor growth inhibition (TGI) was calculated as % TGI=100−[(TuVol^{Treated-day x}−TuVol^{Treated-day18})/(TuVol^{Vehicle negative control-day x}−TuVol^{Vehicle negative control-day}18)*100, where x=day that effect of treatment is being assessed. Group 1, the vehicle negative control group, showed good tumor growth rate for this tumor model.

[0615] For SP154, in the group dosed with 40 mg/kg twice a week 2 mice died during treatment, indicating that this dosing regimen was not tolerable. The dosing regimen of 30 mg/kg of SP154 three times per week was well-tolerated and yielded a TGI of 84%.

[0616] For SP249, the group dosed with 6.7 mg/kg three times per week 4 mice died during treatment, indicating that this dosing regimen was not tolerable.

[0617] All dosing regimens used for SP315 showed good tolerability, with no body weight loss or deaths noted. Dosing with 40 mg/kg of SP315 twice per week produced the highest TGI (92%). The dosing regimens of SP315 of 26.7 mg/kg three times per week, 20 mg/kg twice per week, 30 mg/kg twice per week produced TGI of 86, 82, and 85%, respectively.

[0618] For SP252, the point mutation of SP154 which shows no appreciable activity in in vitro assays, dosing with 30 mg/kg three times per week was well-tolerated with no body weight loss or deaths noted. While TGI of 88% was noted by Day 32, that TGI was reduced to 41% by Day 39.

[0619] Results from Example 17 are shown in FIGS. 8-11 and summarized in Table 31.

TABLE 31

| Group | | % BW | No. with ≧10% | No. with ≧20% | |
|---|---|---|---|---|---|
| Number | Treatment Group | Change | BW Loss | BW Loss or death | % TGI |
| 1 | Vehicle | +8.6 | 0/10 | 0/10 | — |
| 2 | SP154 30 mg/kg | +5.7 | 0/10 | 0/10 | *84 |
| | 3x/wk iv | | | | |
| 3 | SP154 40 mg/kg | N/A | 0/10 | 2/10 | Regimen |
| | 2x/wk iv | | | (2 deaths) | not |
| | | | | | tolerated |
| 4 | SP249 6.7 mg/kg | N/A | 6/10 | 4/10 | Regimen |
| | 3x/wk iv | | | | not |
| | | | | | tolerated |
| 5 | SP315 26.7 mg/kg | +3.7 | 0/10 | 0/10 | *86 |
| | 3x/wk iv | | | | |
| 6 | SP315 20 mg/kg | +3.9 | 0/10 | 0/10 | *82 |
| | 2x/wk iv | | | | |
| 7 | SP315 30 mg/kg | +8.0 | 0/10 | 0/10 | *85 |
| | 2x/wk iv | | | | |
| 8 | SP315 40 mg/kg | +2.1 | 0/10 | 0/10 | *92 |
| | 2x/wk iv | | | | |
| 9 | SP252 30 mg/kg | +3.3 | 0/10 | 0/10 | *41 |
| | 3x/wk iv | | | | |

*p ≦ 0.05 Vs Vehicle Control

### Example 18. Binding Affinity of Compound 1 to Human Mutant and Wild Type p53

[0620] A stapled peptidomimetic macrocycle of the invention, Compound 1, was used in human subjects to assess the binding affinity to the p53 protein variants from human cancer cell lines.

[0621] DNA obtained from cancer samples of candidate patients were sequenced to determine the entire p53 coding region, including TP53 exons, introns, and splice sites. Dysfunctional p53 was inferred from the identification of substitutions, indels, frameshift mutations, splice site mutation, insertions or deletions, copy number variants, large deletions, or polymorphisms. Minimum tumor content was 20%. Average read depth was about 750 reads/amplicon. The lower limit of detection was 5% mutant allele at an average read depth of ≧450 reads per amplicon. When the average read depth was <450 reads per amplicon, the limit of detection was 15% mutant allele.

[0622] Detection of TP53 gene copy number was based on the number of TP53 amplicon reads from a tumor compared with the average number reads across 14 normal DNA samples. Limits of the assay: the loss of one or more alleles can be determined if tumor content is >60% (99% sensitivity); the loss of two alleles can be determined if tumor sample content is >30% (99% sensitivity). More than 10% of tumors with wild type TP53 have a copy number less than 0.5 (<0.5).

[0623] The binding affinity of Compound 1 to p53, measured as the half maximal effective concentration (EC₅₀), was significantly greater for the wild type p53 compared to the mutant p53 as shown in FIG. 13. In general, Compound 1 preferentially bound wild type p53 over mutated p53. However, subpopulations of mutant p53 also exhibited strong affinity to Compound 1 and subpopulations of wild type p53 exhibited weak affinity to Compound 1.

The application's sequence listing, which the Patent Office published only in electronic form, follows.

SEQUENCE LISTING (2582 sequences)

SEQ ID NO: 1 - protein, 16 aa, Artificial Sequence
  Description of Artificial Sequence: Synthetic peptide
  N-term Ac
  C-term NH2
QSQQTFSNLWRLLPQN

SEQ ID NO: 2 - protein, 17 aa, Artificial Sequence
  Description of Artificial Sequence: Synthetic peptide
  N-term Ac
  MOD_RES (1)..(1): Any cross-linked amino acid
  MOD_RES (5)..(5): Any cross-linked amino acid
  C-term NH2
  Crosslinked Sequence
XQSQXTFSNLWRLLPQN

SEQ ID NO: 3 - protein, 16 aa, Artificial Sequence
  Description of Artificial Sequence: Synthetic peptide
  N-term Ac
  MOD_RES (1)..(1): Any cross-linked amino acid
  MOD_RES (5)..(5): Any cross-linked amino acid
  C-term NH2
  Crosslinked Sequence
XSQQXFSNLWRLLPQN

SEQ ID NO: 4 - protein, 16 aa, Artificial Sequence
  Description of Artificial Sequence: Synthetic peptide
  N-term Ac
  MOD_RES (3)..(3): Any cross-linked amino acid
  MOD_RES (7)..(7): Any cross-linked amino acid
  C-term NH2
  Crosslinked Sequence
QSXQTFXNLWRLLPQN

SEQ ID NO: 5 - protein, 16 aa, Artificial Sequence
  Description of Artificial Sequence: Synthetic peptide
  N-term Ac
  MOD_RES (4)..(4): Any cross-linked amino acid
  MOD_RES (8)..(8): Any cross-linked amino acid
  C-term NH2
  Crosslinked Sequence
QSQXTFSXLWRLLPQN

SEQ ID NO: 6 - protein, 16 aa, Artificial Sequence
  Description of Artificial Sequence: Synthetic peptide
  N-term Ac
  MOD_RES (5)..(5): Any cross-linked amino acid
  MOD_RES (9)..(9): Any cross-linked amino acid
  C-term NH2
  Crosslinked Sequence
QSQQXFSNXWRLLPQN

SEQ ID NO: 7 - protein, 16 aa, Artificial Sequence
  Description of Artificial Sequence: Synthetic peptide
  N-term Ac
  MOD_RES (7)..(7): Any cross-linked amino acid
  MOD_RES (11)..(11): Any cross-linked amino acid
  C-term NH2
  Crosslinked Sequence
QSQQTFXNLWXLLPQN

SEQ ID NO: 8 - protein, 16 aa, Artificial Sequence
  Description of Artificial Sequence: Synthetic peptide
  N-term Ac
  MOD_RES (8)..(8): Any cross-linked amino acid
  MOD_RES (12)..(12): Any cross-linked amino acid
  C-term NH2
  Crosslinked Sequence
QSQQTFSXLWRXLPQN

SEQ ID NO: 9 - protein, 16 aa, Artificial Sequence
  Description of Artificial Sequence: Synthetic peptide
  N-term Ac
  MOD_RES (11)..(11): Any cross-linked amino acid
  MOD_RES (15)..(15): Any cross-linked amino acid
  C-term NH2
  Crosslinked Sequence
QSQQTFSNLWXLLPXN

SEQ ID NO: 10 - protein, 16 aa, Artificial Sequence
  Description of Artificial Sequence: Synthetic peptide
  N-term Ac
  MOD_RES (12)..(12): Any cross-linked amino acid
  MOD_RES (16)..(16): Any cross-linked amino acid
  C-term NH2
  Crosslinked Sequence
QSQQTFSNLWRXLPQX

SEQ ID NO: 11 - protein, 17 aa, Artificial Sequence
  Description of Artificial Sequence: Synthetic peptide
  N-term Ac
  MOD_RES (1)..(1): Any cross-linked amino acid
  MOD_RES (8)..(8): Any cross-linked amino acid
  C-term NH2
  Crosslinked Sequence
XQSQQTFXNLWRLLPQN

SEQ ID NO: 12 - protein, 16 aa, Artificial Sequence
  Description of Artificial Sequence: Synthetic peptide
  N-term Ac
  MOD_RES (1)..(1): Any cross-linked amino acid
  MOD_RES (8)..(8): Any cross-linked amino acid
  C-term NH2
  Crosslinked Sequence
XSQQTFSXLWRLLPQN

SEQ ID NO: 13 - protein, 16 aa, Artificial Sequence
  Description of Artificial Sequence: Synthetic peptide
  N-term Ac
  MOD_RES (2)..(2): Any cross-linked amino acid
  MOD_RES (9)..(9): Any cross-linked amino acid
  C-term NH2
  Crosslinked Sequence
QXQQTFSNXWRLLPQN

SEQ ID NO: 14 - protein, 16 aa, Artificial Sequence
  Description of Artificial Sequence: Synthetic peptide
  N-term Ac
  MOD_RES (4)..(4): Any cross-linked amino acid
  MOD_RES (11)..(11): Any cross-linked amino acid
  C-term NH2
  Crosslinked Sequence
QSQXTFSNLWXLLPQN

SEQ ID NO: 15 - protein, 16 aa, Artificial Sequence
  Description of Artificial Sequence: Synthetic peptide
  N-term Ac
  MOD_RES (5)..(5): Any cross-linked amino acid
  MOD_RES (12)..(12): Any cross-linked amino acid
  C-term NH2
  Crosslinked Sequence
QSQQXFSNLWRXLPQN

SEQ ID NO: 16 - protein, 16 aa, Artificial Sequence
  Description of Artificial Sequence: Synthetic peptide
  N-term Ac
  MOD_RES (7)..(7): Any cross-linked amino acid
  MOD_RES (14)..(14): Any cross-linked amino acid
  C-term NH2
  Crosslinked Sequence
QSQQTFXNLWRLLXQN

SEQ ID NO: 17 - protein, 16 aa, Artificial Sequence
  Description of Artificial Sequence: Synthetic peptide
  N-term Ac
  MOD_RES (8)..(8): Any cross-linked amino acid
  MOD_RES (15)..(15): Any cross-linked amino acid
  C-term NH2
  Crosslinked Sequence
QSQQTFSXLWRLLPXN

SEQ ID NO: 18 - protein, 16 aa, Artificial Sequence
  Description of Artificial Sequence: Synthetic peptide
  N-term Ac
  MOD_RES (9)..(9): Any cross-linked amino acid
  MOD_RES (16)..(16): Any cross-linked amino acid
  C-term NH2
  Crosslinked Sequence
QSQQTFSNXWRLLPQX

SEQ ID NO: 19 - protein, 12 aa, Artificial Sequence
  Description of Artificial Sequence: Synthetic peptide
  N-term Ac
  C-term NH2
LTFEHYWAQLTS

SEQ ID NO: 20 - protein, 13 aa, Artificial Sequence
  Description of Artificial Sequence: Synthetic peptide
  N-term Ac
  MOD_RES (1)..(1): Any cross-linked amino acid
  MOD_RES (5)..(5): Any cross-linked amino acid
  C-term NH2
  Crosslinked Sequence
XLTFXHYWAQLTS

SEQ ID NO: 21 - protein, 12 aa, Artificial Sequence
  Description of Artificial Sequence: Synthetic peptide
  N-term Ac
  MOD_RES (1)..(1): Any cross-linked amino acid
  MOD_RES (5)..(5): Any cross-linked amino acid
  C-term NH2
  Crosslinked Sequence
XTFEXYWAQLTS

SEQ ID NO: 22 - protein, 12 aa, Artificial Sequence
  Description of Artificial Sequence: Synthetic peptide
  N-term Ac
  MOD_RES (2)..(2): Any cross-linked amino acid
  MOD_RES (6)..(6): Any cross-linked amino acid
  C-term NH2
  Crosslinked Sequence
LXFEHXWAQLTS

SEQ ID NO: 23 - protein, 12 aa, Artificial Sequence
  Description of Artificial Sequence: Synthetic peptide
  N-term Ac
  MOD_RES (4)..(4): Any cross-linked amino acid
  MOD_RES (8)..(8): Any cross-linked amino acid
  C-term NH2
  Crosslinked Sequence
LTFXHYWXQLTS

SEQ ID NO: 24 - protein, 12 aa, Artificial Sequence
  Description of Artificial Sequence: Synthetic peptide
  N-term Ac
  MOD_RES (5)..(5): Any cross-linked amino acid
  MOD_RES (9)..(9): Any cross-linked amino acid
  C-term NH2
  Crosslinked Sequence
LTFEXYWAXLTS

SEQ ID NO: 25 - protein, 12 aa, Artificial Sequence
  Description of Artificial Sequence: Synthetic peptide
  N-term Ac
  MOD_RES (8)..(8): Any cross-linked amino acid
  MOD_RES (12)..(12): Any cross-linked amino acid
  C-term NH2
  Crosslinked Sequence
LTFEHYWXQLTX

SEQ ID NO: 26 - protein, 13 aa, Artificial Sequence
  Description of Artificial Sequence: Synthetic peptide
  N-term Ac
  MOD_RES (9)..(9): Any cross-linked amino acid
  MOD_RES (13)..(13): Any cross-linked amino acid
  C-term NH2
  Crosslinked Sequence
LTFEHYWAXLTSX

SEQ ID NO: 27 - protein, 12 aa, Artificial Sequence
  Description of Artificial Sequence: Synthetic peptide
  N-term Ac
  MOD_RES (1)..(1): Any cross-linked amino acid
  MOD_RES (8)..(8): Any cross-linked amino acid
  C-term NH2
  Crosslinked Sequence
XTFEHYWXQLTS

SEQ ID NO: 28 - protein, 12 aa, Artificial Sequence
  Description of Artificial Sequence: Synthetic peptide
  N-term Ac
  MOD_RES (2)..(2): Any cross-linked amino acid
  MOD_RES (9)..(9): Any cross-linked amino acid
  C-term NH2
  Crosslinked Sequence
QXFEHYWAXLTS

SEQ ID NO: 29 - protein, 12 aa, Artificial Sequence
  Description of Artificial Sequence: Synthetic peptide
  N-term Ac
  MOD_RES (4)..(4): Any cross-linked amino acid
  MOD_RES (11)..(11): Any cross-linked amino acid
  C-term NH2
  Crosslinked Sequence
QTFXHYWAQLXS

SEQ ID NO: 30 - protein, 12 aa, Artificial Sequence
  Description of Artificial Sequence: Synthetic peptide
  N-term Ac
  MOD_RES (5)..(5): Any cross-linked amino acid
  MOD_RES (12)..(12): Any cross-linked amino acid
  C-term NH2
  Crosslinked Sequence
QTFEXYWAQLTX

SEQ ID NO: 31 - protein, 13 aa, Artificial Sequence
  Description of Artificial Sequence: Synthetic peptide
  N-term Ac
  MOD_RES (6)..(6): Any cross-linked amino acid
  MOD_RES (13)..(13): Any cross-linked amino acid
  C-term NH2
  Crosslinked Sequence
QTFEHXWAQLTSX

SEQ ID NO: 32 - protein, 8 aa, Artificial Sequence
  Description of Artificial Sequence: Synthetic peptide
  N-term Ac
  MOD_RES (3)..(3): 2-aminoisobutyric acid, His or Asn
  MOD_RES (5)..(5): 6-Cl-Trp
  MOD_RES (7)..(7): Aminocyclopropane carboxylic acid residue, Gln or Leu
  C-term NH2
  Crosslinked Sequence
FMXYWEXL

SEQ ID NO: 33 - protein, 9 aa, Artificial Sequence
  Description of Artificial Sequence: Synthetic peptide
  N-term Ac
  MOD_RES (1)..(1): Any cross-linked amino acid
  MOD_RES (4)..(4): 2-aminoisobutyric acid, His or Asn
  MOD_RES (5)..(5): Any cross-linked amino acid
  MOD_RES (6)..(6): 6-Cl-Trp
  MOD_RES (8)..(8): Aminocyclopropane carboxylic acid residue, Gln or Leu
  C-term NH2
  Crosslinked Sequence
XFMXXWEXL

SEQ ID NO: 34 - protein, 8 aa, Artificial Sequence
  Description of Artificial Sequence: Synthetic peptide
  N-term Ac
  MOD_RES (2)..(2): Any cross-linked amino acid
  MOD_RES (3)..(3): 2-aminoisobutyric acid, His or Asn
  MOD_RES (5)..(5): 6-Cl-Trp
  MOD_RES (6)..(6): Any cross-linked amino acid
  MOD_RES (7)..(7): Aminocyclopropane carboxylic acid residue, Gln or Leu
  C-term NH2
  Crosslinked Sequence
FXXYWXXL

SEQ ID NO: 35 - protein, 8 aa, Artificial Sequence
  Description of Artificial Sequence: Synthetic peptide
  N-term Ac
  MOD_RES (3)..(3): Any cross-linked amino acid
  MOD_RES (5)..(5): 6-Cl-Trp
  MOD_RES (7)..(7): Any cross-linked amino acid
  C-term NH2
  Crosslinked Sequence
FMXYWEXL

SEQ ID NO: 36 - protein, 9 aa, Artificial Sequence
  Description of Artificial Sequence: Synthetic peptide
  N-term Ac
  MOD_RES (1)..(1): Any cross-linked amino acid
  MOD_RES (4)..(4): 2-aminoisobutyric acid, His or Asn
  MOD_RES (6)..(6): 6-Cl-Trp
  MOD_RES (8)..(8): Any cross-linked amino acid
  C-term NH2
  Crosslinked Sequence
XFMXYWEXL

SEQ ID NO: 37 - protein, 9 aa, Artificial Sequence
  Description of Artificial Sequence: Synthetic peptide
  N-term Ac
  MOD_RES (2)..(2): Any cross-linked amino acid
  MOD_RES (3)..(3): 2-aminoisobutyric acid, His or Asn
  MOD_RES (5)..(5): 6-Cl-Trp
  MOD_RES (7)..(7): Aminocyclopropane carboxylic acid residue, Gln or Leu
  MOD_RES (9)..(9): Any cross-linked amino acid
  C-term NH2
  Crosslinked Sequence
FXXYWEXLX

SEQ ID NO: 38 - skipped

SEQ ID NO: 39 - protein, 10 aa, Artificial Sequence
  Description of Artificial Sequence: Synthetic peptide
  MOD_RES (2)..(2): Any amino acid
  MOD_RES (9)..(9): Any amino acid
  see specification as filed for detailed description of substitutions and preferred embodiments
FXHYWAQLXS

SEQ ID NO: 40 - skipped

SEQ ID NO: 41 - protein, 10 aa, Artificial Sequence
  Description of Artificial Sequence: Synthetic peptide
  MOD_RES (2)..(2): Any amino acid
  MOD_RES (8)..(8): Leu or Cba
  MOD_RES (9)..(9): Any amino acid
  see specification as filed for detailed description of substitutions and preferred embodiments
FXEYWAQXXA

SEQ ID NO: 42 - protein, 16 aa, Artificial Sequence
  Description of Artificial Sequence: Synthetic peptide
  N-term Ac
  MOD_RES (7)..(7): Alpha-Me R8-octenyl-alanine olefin amino acids connected by an all-carbon i to i+7 crosslinker comprising one double bond
  MOD_RES (14)..(14): Alpha-Me S5-pentenyl-alanine olefin amino acids connected by an all-carbon i to i+4 crosslinker comprising one double bond
  C-term NH2
  Crosslinked Sequence
LSQETFADLWKLLAEN

SEQ ID NO: 43 - protein, 16 aa, Artificial Sequence
  Description of Artificial Sequence: Synthetic peptide
  N-term Ac
  MOD_RES (7)..(7): Alpha-Me R8-octenyl-alanine olefin amino acids connected by an all-carbon i to i+7 crosslinker comprising one double bond
  MOD_RES (14)..(14): Alpha-Me S5-pentenyl-alanine olefin amino acids connected by an all-carbon i to i+4 crosslinker comprising one double bond
  C-term NH2
  Crosslinked Sequence
LSQETFANLWKLLAQN

SEQ ID NO: 44 - protein, 16 aa, Artificial Sequence
  Description of Artificial Sequence: Synthetic peptide
  N-term Ac
  MOD_RES (7)..(7): Alpha-Me R8-octenyl-alanine olefin amino acids connected by an all-carbon i to i+7 crosslinker comprising one double bond
  MOD_RES (14)..(14): Alpha-Me S5-pentenyl-alanine olefin amino acids connected by an all-carbon i to i+4 crosslinker comprising one double bond
  C-term NH2
  Crosslinked Sequence
LSQQTFANLWRLLAQN

SEQ ID NO: 45 - protein, 16 aa, Artificial Sequence
  Description of Artificial Sequence: Synthetic peptide
  N-term Ac
  MOD_RES (7)..(7): Alpha-Me R8-octenyl-alanine olefin amino acids connected by an all-carbon i to i+7 crosslinker comprising one double bond
  MOD_RES (14)..(14): Alpha-Me S5-pentenyl-alanine olefin amino acids connected by an all-carbon i to i+4 crosslinker comprising one double bond
  C-term NH2
  Crosslinked Sequence
QSQQTFANLWKLLAQN

SEQ ID NO: 46 - protein, 16 aa, Artificial Sequence
  Description of Artificial Sequence: Synthetic peptide
  N-term Ac
  MOD_RES (7)..(7): Alpha-Me R8-octenyl-alanine olefin amino acids connected by an all-carbon i to i+7 crosslinker comprising one double bond
  MOD_RES (14)..(14): Alpha-Me S5-pentenyl-alanine olefin amino acids connected by an all-carbon i to i+4 crosslinker comprising one double bond
  C-term NH2
  Crosslinked Sequence
QSQQTFANLWRLLAQN

SEQ ID NO: 47 - protein, 16 aa, Artificial Sequence
  Description of Artificial Sequence: Synthetic peptide
  N-term Ac
  MOD_RES (7)..(7): Alpha-Me R8-octenyl-alanine olefin amino acids connected by an all-carbon i to i+7 crosslinker comprising one double bond
  MOD_RES (14)..(14): Alpha-Me S5-pentenyl-alanine olefin amino acids connected by an all-carbon i to i+4 crosslinker comprising one double bond
  C-term NH2
  Crosslinked Sequence
QSQQTAANLWRLLAQN

SEQ ID NO: 48 - protein, 16 aa, Artificial Sequence
  Description of Artificial Sequence: Synthetic peptide
  N-term Ac
  MOD_RES (2)..(2): 2-aminoisobutyric acid
  MOD_RES (7)..(7): Alpha-Me R8-octenyl-alanine olefin amino acids connected by an all-carbon i to i+7 crosslinker comprising one double bond
  MOD_RES (14)..(14): Alpha-Me S5-pentenyl-alanine olefin amino acids connected by an all-carbon i to i+4 crosslinker comprising one double bond
  C-term NH2
  Crosslinked Sequence
QXQQTFANLWRLLAQN

SEQ ID NO: 49 - protein, 16 aa, Artificial Sequence
  Description of Artificial Sequence: Synthetic peptide
  N-term Ac
  C-term NH2
QSQQTFSNLWRLLPQN

SEQ ID NO: 50 - protein, 16 aa, Artificial Sequence
  Description of Artificial Sequence: Synthetic peptide
  N-term Ac
  MOD_RES (7)..(7): Alpha-Me R8-octenyl-alanine olefin amino acids that are not connected by any crosslinker
  MOD_RES (14)..(14): Alpha-Me S5-pentenyl-alanine olefin amino acids that are not connected by any crosslinker
  C-term NH2
QSQQTFANLWRLLAQN

SEQ ID NO: 51 - protein, 16 aa, Artificial Sequence
  Description of Artificial Sequence: Synthetic peptide
  N-term Ac
  MOD_RES (4)..(4): 2-aminoisobutyric acid
  MOD_RES (7)..(7): Alpha-Me R8-octenyl-alanine olefin amino acids connected by an all-carbon i to i+7 crosslinker comprising one double bond
  MOD_RES (14)..(14): Alpha-Me S5-pentenyl-alanine olefin amino acids connected by an all-carbon i to i+4 crosslinker comprising one double bond
  C-term NH2
  Crosslinked Sequence
QSQXTFANLWRLLAQN

SEQ ID NO: 52 - protein, 16 aa, Artificial Sequence
  Description of Artificial Sequence: Synthetic peptide
  N-term Ac
  MOD_RES (7)..(7): Alpha-Me R8-octenyl-alanine olefin amino acids connected by an all-carbon i to i+7 crosslinker comprising one double bond
  MOD_RES (14)..(14): Alpha-Me S5-pentenyl-alanine olefin amino acids connected by an all-carbon i to i+4 crosslinker comprising one double bond
  C-term NH2
  Crosslinked Sequence
QSQQTFANLWRLLAAN

SEQ ID NO: 53 - protein, 16 aa, Artificial Sequence
  Description of Artificial Sequence: Synthetic peptide
  N-term Ac
  MOD_RES (7)..(7): Alpha-Me R8-octenyl-alanine olefin amino acids connected by an all-carbon i to i+7 crosslinker comprising one double bond
  MOD_RES (14)..(14): Alpha-Me S5-pentenyl-alanine olefin amino acids connected by an all-carbon i to i+4 crosslinker comprising one double bond
  C-term NH2
  Crosslinked Sequence
ASQQTFANLWRLLAQN

SEQ ID NO: 54 - protein, 16 aa, Artificial Sequence
  Description of Artificial Sequence: Synthetic peptide
  N-term Ac
  MOD_RES (7)..(7): Alpha-Me R8-octenyl-alanine olefin amino acids connected by an all-carbon i to i+7 crosslinker comprising one double bond
  MOD_RES (14)..(14): Alpha-Me S5-pentenyl-alanine olefin amino acids connected by an all-carbon i to i+4 crosslinker comprising one double bond
  C-term NH2
  Crosslinked Sequence
QSQQTFAALWRLLAQN

SEQ ID NO: 55 - protein, 16 aa, Artificial Sequence
  Description of Artificial Sequence: Synthetic peptide
  N-term Ac
  MOD_RES (7)..(7): Alpha-Me R8-octenyl-alanine olefin amino acids connected by an all-carbon i to i+7 crosslinker comprising one double bond
  MOD_RES (14)..(14): Alpha-Me S5-pentenyl-alanine olefin amino acids connected by an all-carbon i to i+4 crosslinker comprising one double bond
  C-term NH2
  Crosslinked Sequence
QSQETFANLWRLLAQN

SEQ ID NO: 56 - protein, 16 aa, Artificial Sequence
  Description of Artificial Sequence: Synthetic peptide
  N-term Ac
  MOD_RES (7)..(7): Alpha-Me R8-octenyl-alanine olefin amino acids connected by an all-carbon i to i+7 crosslinker comprising one double bond
  MOD_RES (14)..(14): Alpha-Me S5-pentenyl-alanine olefin amino acids connected by an all-carbon i to i+4 crosslinker comprising one double bond
  C-term NH2
  Crosslinked Sequence
RSQQTFANLWRLLAQN

SEQ ID NO: 57 - protein, 16 aa, Artificial Sequence
  Description of Artificial Sequence: Synthetic peptide
  N-term Ac
  MOD_RES (7)..(7): Alpha-Me R8-octenyl-alanine olefin amino acids connected by an all-carbon i to i+7 crosslinker comprising one double bond
  MOD_RES (14)..(14): Alpha-Me S5-pentenyl-alanine olefin amino acids connected by an all-carbon i to i+4 crosslinker comprising one double bond
  C-term NH2
  Crosslinked Sequence
RSQQTFANLWRLLAEN

SEQ ID NO: 58 - protein, 16 aa, Artificial Sequence
  Description of Artificial Sequence: Synthetic peptide
  N-term Ac
  C-term NH2
LSQETFSDLWKLLPEN

SEQ ID NO: 59 - protein, 16 aa, Artificial Sequence
  Description of Artificial Sequence: Synthetic peptide
  N-term Ac
  MOD_RES (4)..(4): Alpha-Me S5-pentenyl-alanine olefin amino acids connected by an all-carbon i to i+4 crosslinker comprising one double bond
  MOD_RES (8)..(8): Alpha-Me S5-pentenyl-alanine olefin amino acids connected by an all-carbon i to i+4 crosslinker comprising one double bond
  C-term NH2
  Crosslinked Sequence
QSQATFSALWRLLPQN

SEQ ID NO: 60 - protein, 16 aa, Artificial Sequence
  Description of Artificial Sequence: Synthetic peptide
  N-term Ac
  MOD_RES (5)..(5): Alpha-Me S5-pentenyl-alanine olefin amino acids connected by an all-carbon i to i+4 crosslinker comprising one double bond
  MOD_RES (9)..(9): Alpha-Me S5-pentenyl-alanine olefin amino acids connected by an all-carbon i to i+4 crosslinker comprising one double bond
  C-term NH2
  Crosslinked Sequence
QSQQAFSNAWRLLPQN

SEQ ID NO: 61 - protein, 16 aa, Artificial Sequence
  Description of Artificial Sequence: Synthetic peptide
  N-term Ac
  MOD_RES (6)..(6): Alpha-Me S5-pentenyl-alanine olefin amino acids connected by an all-carbon i to i+4 crosslinker comprising one double bond
  MOD_RES (10)..(10): Alpha-Me S5-pentenyl-alanine olefin amino acids connected by an all-carbon i to i+4 crosslinker comprising one double bond
  C-term NH2
  Crosslinked Sequence
QSQQTASNLARLLPQN

SEQ ID NO: 62 - protein, 16 aa, Artificial Sequence
  Description of Artificial Sequence: Synthetic peptide
  N-term Ac
  MOD_RES (7)..(7): Alpha-Me S5-pentenyl-alanine olefin amino acids connected by an all-carbon i to i+4 crosslinker comprising one double bond
  MOD_RES (11)..(11): Alpha-Me S5-pentenyl-alanine olefin amino acids connected by an all-carbon i to i+4 crosslinker comprising one double bond
  C-term NH2
  Crosslinked Sequence
QSQQTFANLWALLPQN

SEQ ID NO: 63 - protein, 19 aa, Artificial Sequence
  Description of Artificial Sequence: Synthetic peptide
  N-term Ac
  MOD_RES (7)..(7): Alpha-Me R8-octenyl-alanine olefin amino acids connected by an all-carbon i to i+7 crosslinker comprising one double bond
  MOD_RES (11)..(11): 2-aminoisobutyric acid
  MOD_RES (13)..(13): Norleucine
  MOD_RES (14)..(14): Alpha-Me S5-pentenyl-alanine olefin amino acids connected by an all-carbon i to i+4 crosslinker comprising one double bond
  MOD_RES (17)..(17): 2-aminoisobutyric acid
  C-term NH2
  Crosslinked Sequence
RTQATFANQWXALATNXTR

SEQ ID NO: 64 - protein, 16 aa, Artificial Sequence
  Description of Artificial Sequence: Synthetic peptide
  N-term Ac
  MOD_RES (7)..(7): Alpha-Me R8-octenyl-alanine olefin amino acids connected by an all-carbon i to i+7 crosslinker comprising one double bond
  MOD_RES (14)..(14): Alpha-Me S5-pentenyl-alanine olefin amino acids connected by an all-carbon i to i+4 crosslinker comprising one double bond
  C-term NH2
  Crosslinked Sequence
QSQQTFANLWRLLARN

SEQ ID NO: 65 - protein, 16 aa, Artificial Sequence
  Description of Artificial Sequence: Synthetic peptide
  N-term Ac
  MOD_RES (7)..(7): Alpha-Me R8-octenyl-alanine olefin amino acids connected by an all-carbon i to i+7 crosslinker comprising one double bond
  MOD_RES (14)..(14): Alpha-Me S5-pentenyl-alanine olefin amino acids connected by an all-carbon i to i+4 crosslinker comprising one double bond
  C-term NH2
  Crosslinked Sequence
QSQRTFANLWRLLAQN

SEQ ID NO: 66 - protein, 16 aa, Artificial Sequence
  Description of Artificial Sequence: Synthetic peptide
  N-term Ac
  MOD_RES (7)..(7): Alpha-Me R8-octenyl-alanine olefin amino acids connected by an all-carbon i to i+7 crosslinker comprising one double bond
  MOD_RES (9)..(9): Norleucine
  MOD_RES (14)..(14): Alpha-Me S5-pentenyl-alanine olefin amino acids connected by an all-carbon i to i+4 crosslinker comprising one double bond
  C-term NH2
  Crosslinked Sequence
QSQQTFANLWRLLAQN

SEQ ID NO: 67 - protein, 16 aa, Artificial Sequence
  Description of Artificial Sequence: Synthetic peptide
  N-term Ac
  MOD_RES (7)..(7): Alpha-Me R8-octenyl-alanine olefin amino acids connected by an all-carbon i to i+7 crosslinker comprising one double bond
  MOD_RES (12)..(12): Norleucine
  MOD_RES (14)..(14): Alpha-Me S5-pentenyl-alanine olefin amino acids connected by an all-carbon i to i+4 crosslinker comprising one double bond
  C-term NH2
  Crosslinked Sequence
QSQQTFANLWRLLAQN

SEQ ID NO: 68 - protein, 16 aa, Artificial Sequence
  Description of Artificial Sequence: Synthetic peptide
  N-term Ac
  MOD_RES (7)..(7): Alpha-Me R8-octenyl-alanine olefin amino acids connected by an all-carbon i to i+7 crosslinker comprising one double bond
  MOD_RES (13)..(13): Norleucine
  MOD_RES (14)..(14): Alpha-Me S5-pentenyl-alanine olefin amino acids connected by an all-carbon i to i+4 crosslinker comprising one double bond
  C-term NH2
  Crosslinked Sequence
QSQQTFANLWRLLAQN

SEQ ID NO: 69 - protein, 16 aa, Artificial Sequence
  Description of Artificial Sequence: Synthetic peptide
  N-term Ac
  MOD_RES (7)..(7): Alpha-Me R8-octenyl-alanine olefin amino acids connected by an all-carbon i to i+7 crosslinker comprising one double bond
  MOD_RES (14)..(14): Alpha-Me S5-pentenyl-alanine olefin amino acids connected by an all-carbon i to i+4 crosslinker comprising one double bond
  C-term NH2
  Crosslinked Sequence
QSQQTYANLWRLLAQN

SEQ ID NO: 70 - protein, 16 aa, Artificial Sequence
  Description of Artificial Sequence: Synthetic peptide
  N-term Ac
  MOD_RES (2)..(2): 2-aminoisobutyric acid
  MOD_RES (7)..(7): Alpha-Me R8-octenyl-alanine olefin amino acids connected by an all-carbon i to i+7 crosslinker comprising one double bond
  MOD_RES (14)..(14): Alpha-Me S5-pentenyl-alanine olefin amino acids connected by an all-carbon i to i+4 crosslinker comprising one double bond
  C-term NH2
  Crosslinked Sequence
RXQQTFANLWRLLAQN

SEQ ID NO: 71 - protein, 12 aa, Artificial Sequence
  Description of Artificial Sequence: Synthetic peptide
  N-term Ac
  C-term NH2
MPRFMDYWEGLN

SEQ ID NO: 72 - protein, 16 aa, Artificial Sequence
  Description of Artificial Sequence: Synthetic peptide
  N-term Ac
  MOD_RES (7)..(7): Alpha-Me R8-octenyl-alanine olefin amino acids connected by an all-carbon i to i+7 crosslinker comprising one double bond
  MOD_RES (14)..(14): Alpha-Me S5-pentenyl-alanine olefin amino acids connected by an all-carbon i to i+4 crosslinker comprising one double bond
  C-term NH2
  Crosslinked Sequence
RSQQRFANLWRLLAQN

SEQ ID NO: 73 - protein, 16 aa, Artificial Sequence
  Description of Artificial Sequence: Synthetic peptide
  N-term Ac
  MOD_RES (7)..(7): Alpha-Me R8-octenyl-alanine olefin amino acids connected by an all-carbon i to i+7 crosslinker comprising one double bond
  MOD_RES (14)..(14): Alpha-Me S5-pentenyl-alanine olefin amino acids connected by an all-carbon i to i+4 crosslinker comprising one double bond
  C-term NH2
  Crosslinked Sequence
QSQQRFANLWRLLAQN

SEQ ID NO: 74 - protein, 16 aa, Artificial Sequence
  Description of Artificial Sequence: Synthetic peptide
  N-term Ac
  MOD_RES (2)..(2): 2-aminoisobutyric acid
  MOD_RES (7)..(7): Alpha-Me R8-octenyl-alanine olefin amino acids connected by an all-carbon i to i+7 crosslinker comprising one double bond
  MOD_RES (14)..(14): Alpha-Me S5-pentenyl-alanine olefin amino acids connected by an all-carbon i to i+4 crosslinker comprising one double bond
  C-term NH2
  Crosslinked Sequence
RXQQRFANLWRLLAQN

SEQ ID NO: 75 - protein, 16 aa, Artificial Sequence
  Description of Artificial Sequence: Synthetic peptide
  N-term Ac
  MOD_RES (7)..(7): Alpha-Me R8-octenyl-alanine olefin amino acids connected by an all-carbon i to i+7 crosslinker comprising one double bond
  MOD_RES (14)..(14): Alpha-Me S5-pentenyl-alanine olefin amino acids connected by an all-carbon i to i+4 crosslinker comprising one double bond
  C-term NH2
  Crosslinked Sequence
RSQQRFANFWRLLAQN

SEQ ID NO: 76 - protein, 16 aa, Artificial Sequence
  Description of Artificial Sequence: Synthetic peptide
  N-term Ac
  MOD_RES (7)..(7): Alpha-Me R8-octenyl-alanine olefin amino acids connected by an all-carbon i to i+7 crosslinker comprising one double bond
  MOD_RES (14)..(14): Alpha-Me S5-pentenyl-alanine olefin amino acids connected by an all-carbon i to i+4 crosslinker comprising one double bond
  C-term NH2
  Crosslinked Sequence
RSQQRFANYWRLLAQN

SEQ ID NO: 77 - protein, 16 aa, Artificial Sequence
  Description of Artificial Sequence: Synthetic peptide
  N-term Ac
  MOD_RES (7)..(7): Alpha-Me R8-octenyl-alanine olefin amino acids connected by an all-carbon i to i+7 crosslinker comprising one double bond
  MOD_RES (14)..(14): Alpha-Me S5-pentenyl-alanine olefin amino acids connected by an all-carbon i to i+4 crosslinker comprising one double bond
  C-term NH2
  Crosslinked Sequence
RSQQTFANLWQLLAQN

SEQ ID NO: 78 - protein, 16 aa, Artificial Sequence
  Description of Artificial Sequence: Synthetic peptide
  N-term Ac
  MOD_RES (7)..(7): Alpha-Me R8-octenyl-alanine olefin amino acids connected by an all-carbon i to i+7 crosslinker comprising one double bond
  MOD_RES (12)..(12): Alpha-Me-Leu
  MOD_RES (14)..(14): Alpha-Me S5-pentenyl-alanine olefin amino acids connected by an all-carbon i to i+4 crosslinker comprising one double bond
  C-term NH2
  Crosslinked Sequence
QSQQTFANLWQLLAQN

SEQ ID NO: 79 - protein, 16 aa, Artificial Sequence
  Description of Artificial Sequence: Synthetic peptide
  N-term Ac
  MOD_RES (7)..(7): Alpha-Me R8-octenyl-alanine olefin amino acids connected by an all-carbon i to i+7 crosslinker comprising one double bond
  MOD_RES (9)..(9): Alpha-Me-Leu
  MOD_RES (14)..(14): Alpha-Me S5-pentenyl-alanine olefin amino acids connected by an all-carbon i to i+4 crosslinker comprising one double bond
  C-term NH2
  Crosslinked Sequence
QSQQTFANLWRLLAQN

SEQ ID NO: 80 - protein, 14 aa, Artificial Sequence
  Description of Artificial Sequence: Synthetic peptide
  N-term Ac
  MOD_RES (1)..(1): Norleucine
  MOD_RES (5)..(5): Alpha-Me R8-octenyl-alanine olefin amino acids connected by an all-carbon i to i+7 crosslinker comprising one double bond
  MOD_RES (12)..(12): Alpha-Me S5-pentenyl-alanine olefin amino acids connected by an all-carbon i to i+4 crosslinker comprising one double bond
  C-term NH2
  Crosslinked Sequence
LPRFADYWEGLAQN

SEQ ID NO: 81 - protein, 14 aa, Artificial Sequence
  Description of Artificial Sequence: Synthetic peptide
  N-term Ac
  MOD_RES (1)..(1): Norleucine
  MOD_RES (5)..(5): Alpha-Me R8-octenyl-alanine olefin amino acids connected by an all-carbon i to i+7 crosslinker comprising one double bond
  MOD_RES (12)..(12): Alpha-Me S5-pentenyl-alanine olefin amino acids connected by an all-carbon i to i+4 crosslinker comprising one double bond
  C-term NH2
  Crosslinked Sequence
LPRFANYWRLLAQN

SEQ ID NO: 82 - protein, 11 aa, Artificial Sequence
  Description of Artificial Sequence: Synthetic peptide
  N-term Ac
  MOD_RES (3)..(3): Alpha-Me R8-octenyl-alanine olefin amino acids connected by an all-carbon i to i+7 crosslinker comprising one double bond
  MOD_RES (10)..(10): Alpha-Me S5-pentenyl-alanine olefin amino acids connected by an all-carbon i to i+4 crosslinker comprising one double bond
  C-term NH2
  Crosslinked Sequence
RFANLWRLLAQ

SEQ ID NO: 83 - protein, 15 aa, Artificial Sequence
  Description of Artificial Sequence: Synthetic peptide
  N-term Ac
  MOD_RES (7)..(7): Alpha-Me R8-octenyl-alanine olefin amino acids connected by an all-carbon i to i+7 crosslinker comprising one double bond
  MOD_RES (9)..(9): 2-fluoro-Phe
  MOD_RES (13)..(13): Alpha-Me S5-pentenyl-alanine olefin amino acids connected by an all-carbon i to i+4 crosslinker comprising one double bond
  C-term NH2
  Crosslinked Sequence
QSQQTFANWRLLAQN

SEQ ID NO: 84 - protein, 15 aa, Artificial Sequence
  Description of Artificial Sequence: Synthetic peptide
  N-term Ac
  MOD_RES (7)..(7): Alpha-Me R8-octenyl-alanine olefin amino acids connected by an all-carbon i to i+7 crosslinker comprising one double bond
  MOD_RES (9)..(9): 3-fluoro-Phe
  MOD_RES (13)..(13): Alpha-Me S5-pentenyl-alanine olefin amino acids connected by an all-carbon i to i+4 crosslinker comprising one double bond
  C-term NH2
  Crosslinked Sequence
QSQQTFANWRLLAQN

SEQ ID NO: 85 - protein, 16 aa, Artificial Sequence
  Description of Artificial Sequence: Synthetic peptide
  N-term Ac
  MOD_RES (7)..(7): Alpha-hydrogen R8-octenyl-alanine olefin amino acid connected by an all-carbon crosslinker comprising one double bond
  MOD_RES (14)..(14): Alpha-hydrogen S5-pentenyl-alanine olefin amino acid connected by an all-carbon crosslinker comprising one double bond
  C-term NH2
  Crosslinked Sequence
QSQQTFANLWRLLAQN

SEQ ID NO: 86 - protein, 16 aa, Artificial Sequence
  Description of Artificial Sequence: Synthetic peptide
  N-term Ac
  MOD_RES (7)..(7): Alpha-Me R8-octenyl-alanine olefin amino acids connected by an all-carbon i to i+7 crosslinker comprising one double bond
  MOD_RES (14)..(14): Alpha-Me S5-pentenyl-alanine olefin amino acids connected by an all-carbon i to i+4 crosslinker comprising one double bond
  C-term NH2
  Crosslinked Sequence
RSQQTAANLWRLLAQN

SEQ ID NO: 87 - protein, 16 aa, Artificial Sequence
  Description of Artificial Sequence: Synthetic peptide
  N-term Ac
  MOD_RES (6)..(6): Alpha-methyl R8-octenyl-alanine olefin amino acid connected by an all-carbon crosslinker that is fully saturated
  MOD_RES (13)..(13): Alpha-methyl S5-pentenyl-alanine olefin amino acid connected by an all-carbon crosslinker that is fully saturated
  C-term NH2
  Crosslinked Sequence
QSQQTFANLWRLLAQN

SEQ ID NO: 88 - protein, 16 aa, Artificial Sequence
  Description of Artificial Sequence: Synthetic peptide
  N-term acetylated with heptanoic acid and connected to internal olefin amino acid by an all-carbon crosslinker comprising one double bond
  MOD_RES (4)..(4): Alpha-Me S5-pentenyl-alanine olefin amino acids connected by an all-carbon i to i+4 crosslinker comprising one double bond
  C-term NH2
  Crosslinked Sequence
QSQATFSNLWRLLPQN

SEQ ID NO: 89 - protein, 16 aa, Artificial Sequence
  Description of Artificial Sequence: Synthetic peptide
  N-term acetylated with heptanoic acid and connected to internal olefin amino acid by an all-carbon crosslinker comprising one double bond
  MOD_RES (4)..(4): Alpha-Me S5-pentenyl-alanine olefin amino acids connected by an all-carbon i to i+4 crosslinker comprising one double bond
  MOD_RES (7)..(7): Alpha-Me R8-octenyl-alanine olefin amino acids connected by an all-carbon i to i+7 crosslinker comprising one double bond
  MOD_RES (14)..(14): Alpha-Me S5-pentenyl-alanine olefin amino acids connected by an all-carbon i to i+4 crosslinker comprising one double bond
  C-term NH2
  Crosslinked Sequence
QSQATFANLWRLLAQN

SEQ ID NO: 90 - protein, 16 aa, Artificial Sequence
  Description of Artificial Sequence: Synthetic peptide
  N-term Ac
  MOD_RES (7)..(7): Alpha-Me R8-octenyl-alanine olefin amino acids connected by an all-carbon i to i+7 crosslinker comprising one double bond
  MOD_RES (10)..(10): 6cl-Trp
  MOD_RES (14)..(14): Alpha-Me S5-pentenyl-alanine olefin amino acids connected by an all-carbon i to i+4 crosslinker comprising one double bond
  C-term NH2
  Crosslinked Sequence
QSQQTFANLWRLLAQN

SEQ ID NO: 91 - protein, 16 aa, Artificial Sequence
  Description of Artificial Sequence: Synthetic peptide
  N-term Ac
  MOD_RES (7)..(7): Alpha-Me R8-octenyl-alanine olefin amino acids connected by an all-carbon i to i+7 crosslinker comprising one double bond
  MOD_RES (10)..(10): Me6cl-D-Trp
  MOD_RES (14)..(14): Alpha-Me S5-pentenyl-alanine olefin amino acids connected by an all-carbon i to i+4 crosslinker comprising one double bond
  C-term NH2
  Crosslinked Sequence
QSQQTFANLWRLLAQN

SEQ ID NO: 92 - protein, 12 aa, Artificial Sequence
  Description of Artificial Sequence: Synthetic peptide
  N-term Ac
  C-term NH2
LTFEHYWAQLTS

SEQ ID NO: 93 - protein, 12 aa, Artificial Sequence
  Description of Artificial Sequence: Synthetic peptide
  N-term Ac
  MOD_RES (4)..(4): Alpha-Me S5-pentenyl-alanine olefin amino acids connected by an all-carbon i to i+4 crosslinker comprising one double bond
  MOD_RES (8)..(8): Alpha-Me S5-pentenyl-alanine olefin amino acids connected by an all-carbon i to i+4 crosslinker comprising one double bond
  C-term NH2
  Crosslinked Sequence
LTFAHYWAQLTS

SEQ ID NO: 94 - protein, 12 aa, Artificial Sequence
  Description of Artificial Sequence: Synthetic peptide
  N-term Ac
  MOD_RES (5)..(5): Alpha-Me S5-pentenyl-alanine olefin amino acids connected by an all-carbon i to i+4 crosslinker comprising one double bond
  MOD_RES (9)..(9): Alpha-Me S5-pentenyl-alanine olefin amino acids connected by an all-carbon i to i+4 crosslinker comprising one double bond
  C-term NH2
  Crosslinked Sequence
LTFEAYWAALTS

SEQ ID NO: 95 - protein, 12 aa, Artificial Sequence
  Description of Artificial Sequence: Synthetic peptide
  N-term Ac
  MOD_RES (4)..(4): Alpha-methyl R8-octenyl-alanine olefin amino acid connected by an all-carbon crosslinker comprising one double bond in cis configuration
  MOD_RES (11)..(11): Alpha-methyl S5-pentenyl-alanine olefin amino acid connected by an all-carbon crosslinker comprising one double bond in cis configuration
  C-term NH2
  Crosslinked Sequence
LTFAHYWAQLAS

SEQ ID NO: 96 - protein, 12 aa, Artificial Sequence
  Description of Artificial Sequence: Synthetic peptide
  N-term Ac
  MOD_RES (4)..(4): Alpha-Me R8-octenyl-alanine olefin amino acids connected by an all-carbon i to i+7 crosslinker comprising one double bond
  MOD_RES (11)..(11): Alpha-Me S5-pentenyl-alanine olefin amino acids connected by an all-carbon i to i+4 crosslinker comprising one double bond
  C-term NH2
  Crosslinked Sequence
LTFAHYWRQLAS

SEQ ID NO: 97 - protein, 16 aa, Artificial Sequence
  Description of Artificial Sequence: Synthetic peptide
  N-term Ac
  MOD_RES (3)..(3): Alpha-Me S5-pentenyl-alanine olefin amino acids connected by an all-carbon i to i+4 crosslinker comprising one double bond
  MOD_RES (7)..(7): Two Pentyl-alanine olefin amino acid side chain, each of which is crosslinked to another amino acid as indicated
  MOD_RES (14)..(14): Alpha-Me S8-octenyl-alanine olefin amino acids connected by an all-carbon i to i+7 crosslinker comprising one double bond
  C-term NH2
  Crosslinked Sequence
QSAQTFANLWRLLAQN

SEQ ID NO: 98 - protein, 16 aa, Artificial Sequence
  Description of Artificial Sequence: Synthetic peptide
  N-term Ac
  C-term NH2
QSQQTASNLWRLLPQN

SEQ ID NO: 99 - protein, 16 aa, Artificial Sequence
  Description of Artificial Sequence: Synthetic peptide
  N-term Ac
  MOD_RES (7)..(7): Alpha-Me R8-octenyl-alanine olefin amino acids that are not connected by any crosslinker
  MOD_RES (14)..(14): Alpha-Me S5-pentenyl-alanine olefin amino acids that are not connected by any crosslinker
  C-term NH2
QSQQTAANLWRLLAQN

SEQ ID NO: 100 - protein, 16 aa, Artificial Sequence
  Description of Artificial Sequence: Synthetic peptide
  N-term Ac
  MOD_RES (7)..(7): Alpha-Me R8-octenyl-alanine olefin amino acids that are not connected by any crosslinker
  MOD_RES (14)..(14): Alpha-Me S5-pentenyl-alanine olefin amino acids that are not connected by any crosslinker
  C-term NH2
ASQQTFANLWRLLAQN

SEQ ID NO: 101 - protein, 16 aa, Artificial Sequence
  Description of Artificial Sequence: Synthetic peptide
  N-term Ac
  MOD_RES (1)..(1): Alpha-Me S5-pentenyl-alanine olefin amino acids connected by an all-carbon i to i+4 crosslinker comprising one double bond
  MOD_RES (5)..(5): Alpha-Me S5-pentenyl-alanine olefin amino acids connected by an all-carbon i to i+4 crosslinker comprising one double bond
  MOD_RES (14)..(14): 2-aminoisobutyric acid
  C-term NH2
  Crosslinked Sequence
ASQQAFSNLWRLLXQN

SEQ ID NO: 102 - protein, 16 aa, Artificial Sequence
  Description of Artificial Sequence: Synthetic peptide
  N-term Ac
  MOD_RES (3)..(3): Alpha-Me S5-pentenyl-alanine olefin amino acids connected by an all-carbon i to i+4 crosslinker comprising one double bond
  MOD_RES (7)..(7): Alpha-Me S5-pentenyl-alanine olefin amino acids connected by an all-carbon i to i+4 crosslinker comprising one double bond
  MOD_RES (14)..(14): 2-aminoisobutyric acid
  C-term NH2
  Crosslinked Sequence
QSAQTFANLWRLLXQN

SEQ ID NO: 103 - protein, 16 aa, Artificial Sequence
  Description of Artificial Sequence: Synthetic peptide
  N-term Ac
  MOD_RES (5)..(5): Alpha-Me S5-pentenyl-alanine olefin amino acids connected by an all-carbon i to i+4 crosslinker comprising one double bond
  MOD_RES (9)..(9): Alpha-Me S5-pentenyl-alanine olefin amino acids connected by an all-carbon i to i+4 crosslinker comprising one double bond
  MOD_RES (14)..(14): 2-aminoisobutyric acid
  C-term NH2
  Crosslinked Sequence
QSQQAFSNAWRLLXQN

SEQ ID NO: 104 - protein, 16 aa, Artificial Sequence
  Description of Artificial Sequence: Synthetic peptide
  N-term Ac
  MOD_RES (7)..(7): Alpha-Me S5-pentenyl-alanine olefin amino acids connected by an all-carbon i to i+4 crosslinker comprising one double bond
  MOD_RES (11)..(11): Alpha-Me S5-pentenyl-alanine olefin amino acids connected by an all-carbon i to i+4 crosslinker comprising one double bond
  MOD_RES (14)..(14): 2-aminoisobutyric acid
  C-term NH2
  Crosslinked Sequence
QSQQTFANLWALLXQN

SEQ ID NO: 105 - protein, 16 aa, Artificial Sequence
  Description of Artificial Sequence: Synthetic peptide
  N-term Ac
  MOD_RES (8)..(8): Alpha-Me S5-pentenyl-alanine olefin amino acids connected by an all-carbon i to i+4 crosslinker comprising one double bond
  MOD_RES (12)..(12): Alpha-Me S5-pentenyl-alanine olefin amino acids connected by an all-carbon i to i+4 crosslinker comprising one double bond
  MOD_RES (14)..(14): 2-aminoisobutyric acid
  C-term NH2
  Crosslinked Sequence
QSQQTFSALWRALXQN

SEQ ID NO: 106 - protein, 16 aa, Artificial Sequence
  Description of Artificial Sequence: Synthetic peptide
  N-term Ac
  MOD_RES (11)..(11): Alpha-Me S5-pentenyl-alanine olefin amino acids connected by an all-carbon i to i+4 crosslinker comprising one double bond
  MOD_RES (15)..(15): Alpha-Me S5-pentenyl-alanine olefin amino acids connected by an all-carbon i to i+4 crosslinker comprising one double bond
  C-term NH2
  Crosslinked Sequence
QSQQTFSNLWALLAAN

SEQ ID NO: 107 - protein, 16 aa, Artificial Sequence
  Description of Artificial Sequence: Synthetic peptide
  N-term Ac
  MOD_RES (1)..(1): Alpha-Me S5-pentenyl-alanine olefin amino acids that are not connected by any crosslinker
  MOD_RES (5)..(5): Alpha-Me S5-pentenyl-alanine olefin amino acids that are not connected by any crosslinker
  MOD_RES (14)..(14): 2-aminoisobutyric acid
  C-term NH2
ASQQAFSNLWRLLXQN

SEQ ID NO: 108 - protein, 16 aa, Artificial Sequence
  Description of Artificial Sequence: Synthetic peptide
  N-term Ac
  MOD_RES (3)..(3): Alpha-Me S5-pentenyl-alanine olefin amino acids that are not connected by any crosslinker
  MOD_RES (7)..(7): Alpha-Me S5-pentenyl-alanine olefin amino acids that are not connected by any crosslinker
  MOD_RES (14)..(14): 2-aminoisobutyric acid
  C-term NH2
QSAQTFANLWRLLXQN

SEQ ID NO: 109 - protein, 16 aa, Artificial Sequence
  Description of Artificial Sequence: Synthetic peptide
  N-term Ac
  MOD_RES (5)..(5): Alpha-Me S5-pentenyl-alanine olefin amino acids that are not connected by any crosslinker
  MOD_RES (9)..(9): Alpha-Me S5-pentenyl-alanine olefin amino acids that are not connected by any crosslinker
  MOD_RES (14)..(14): 2-aminoisobutyric acid
  C-term NH2
QSQQAFSNAWRLLXQN

SEQ ID NO: 110 - protein, 16 aa, Artificial Sequence
  Description of Artificial Sequence: Synthetic peptide
  N-term Ac
  MOD_RES (7)..(7): Alpha-Me S5-pentenyl-alanine olefin amino acids that are not connected by any crosslinker
  MOD_RES (11)..(11): Alpha-Me S5-pentenyl-alanine olefin amino acids that are not connected by any crosslinker
  MOD_RES (14)..(14): 2-aminoisobutyric acid
  C-term NH2
QSQQTFANLWALLXQN

SEQ ID NO: 111 - protein, 16 aa, Artificial Sequence
  Description of Artificial Sequence: Synthetic peptide
  N-term Ac
  MOD_RES (4)..(4): Alpha-Me S5-pentenyl-alanine olefin amino acids connected by an all-carbon i to i+4 crosslinker comprising one double bond
  MOD_RES (8)..(8): Alpha-Me S5-pentenyl-alanine olefin amino acids connected by an all-carbon i to i+4 crosslinker comprising one double bond
  MOD_RES (14)..(14): 2-aminoisobutyric acid
  C-term NH2
  Crosslinked Sequence
QSQATFSALWRLLXQN

SEQ ID NO: 112 - protein, 16 aa, Artificial Sequence
  Description of Artificial Sequence: Synthetic peptide
  N-term Ac
  MOD_RES (4)..(4): Alpha-Me S5-pentenyl-alanine olefin amino acids that are not connected by any crosslinker
  MOD_RES (8)..(8): Alpha-Me S5-pentenyl-alanine olefin amino acids that are not connected by any crosslinker
  MOD_RES (14)..(14): 2-aminoisobutyric acid
  C-term NH2
QSQATFSALWRLLXQN

SEQ ID NO: 113 - protein, 16 aa, Artificial Sequence
  Description of Artificial Sequence: Synthetic peptide
  N-term Ac
  MOD_RES (3)..(3): Alpha-Me S5-pentenyl-alanine olefin amino acids that are not connected by any crosslinker
  MOD_RES (7)..(7): Two pentenyl-alanine olefin side chains where one side chain is not crosslinked
  MOD_RES (14)..(14): Alpha-Me S8-octenyl-alanine olefin amino acids that are not connected by any crosslinker
  C-term NH2
QSAQTFANLWRLLAQN

SEQ ID NO: 114 - protein, 16 aa, Artificial Sequence
  Description of Artificial Sequence: Synthetic peptide
  N-term Ac
  MOD_RES (1)..(1): Alpha-Me R8-octenyl-alanine olefin amino acids connected by an all-carbon i to i+7 crosslinker comprising one double bond
  MOD_RES (8)..(8): Alpha-Me S5-pentenyl-alanine olefin amino acids connected by an all-carbon i to i+4 crosslinker comprising one double bond
  MOD_RES (14)..(14): 2-aminoisobutyric acid
  C-term NH2
  Crosslinked Sequence
ASQQTFSALWRLLXQN

SEQ ID NO: 115 - protein, 16 aa, Artificial Sequence
  Description of Artificial Sequence: Synthetic peptide
  N-term Ac
  MOD_RES (4)..(4): Alpha-Me R8-octenyl-alanine olefin amino acids connected by an all-carbon i to i+7 crosslinker comprising one double bond
  MOD_RES (11)..(11): Alpha-Me S5-pentenyl-alanine olefin amino acids connected by an all-carbon i to i+4 crosslinker comprising one double bond
  MOD_RES (14)..(14): 2-aminoisobutyric acid
  C-term NH2
  Crosslinked Sequence
QSQATFSNLWALLXQN

SEQ ID NO: 116 - protein, 16 aa, Artificial Sequence
  Description of Artificial Sequence: Synthetic peptide
  N-term Ac
  MOD_RES (8)..(8): Alpha-Me R8-octenyl-alanine olefin amino acids connected by an all-carbon i to i+7 crosslinker comprising one double bond
  MOD_RES (15)..(15): Alpha-Me S5-pentenyl-alanine olefin amino acids connected by an all-carbon i to i+4 crosslinker comprising one double bond
  C-term NH2
  Crosslinked Sequence
QSQQTFSALWRLLAAN

SEQ ID NO: 117 - protein, 16 aa, Artificial Sequence
  Description of Artificial Sequence: Synthetic peptide
  N-term Ac
  MOD_RES (3)..(3): Alpha-Me R5-pentenyl-alanine olefin amino acids connected by an all-carbon i to i+4 crosslinker comprising one double bond
  MOD_RES (7)..(7): Two Pentenyl-alanine olefin side chains, each of which is crosslinked to another amino acid as indicated
  MOD_RES (11)..(11): Alpha-Me S5-pentenyl-alanine olefin amino acids connected by an all-carbon i to i+4 crosslinker comprising one double bond
  MOD_RES (14)..(14): 2-aminoisobutyric acid
  C-term NH2
  Crosslinked Sequence
QSAQTFANLWALLXQN

SEQ ID NO: 118 - protein, 16 aa, Artificial Sequence
  Description of Artificial Sequence: Synthetic peptide
  N-term Ac
  MOD_RES (1)..(1): Alpha-Me R8-octenyl-alanine olefin amino acids that are not connected by any crosslinker
  MOD_RES (8)..(8): Alpha-Me S5-pentenyl-alanine olefin amino acids that are not connected by any crosslinker
  MOD_RES (14)..(14): 2-aminoisobutyric acid
  C-term NH2
ASQQTFSALWRLLXQN

SEQ ID NO: 119 - protein, 16 aa, Artificial Sequence
  Description of Artificial Sequence: Synthetic peptide
  N-term Ac
  MOD_RES (4)..(4): Alpha-Me R8-octenyl-alanine olefin amino acids that are not connected by any crosslinker
  MOD_RES (11)..(11): Alpha-Me S5-pentenyl-alanine olefin amino acids that are not connected by any crosslinker
  MOD_RES (14)..(14): 2-aminoisobutyric acid
  C-term NH2
QSQATFSNLWALLXQN

SEQ ID NO: 120 - protein, 16 aa, Artificial Sequence
  Description of Artificial Sequence: Synthetic peptide
  N-term Ac
  MOD_RES (8)..(8): Alpha-Me R8-octenyl-alanine olefin amino acids that are not connected by any crosslinker
  MOD_RES (15)..(15): Alpha-Me S5-pentenyl-alanine olefin amino acids that are not connected by any crosslinker
  C-term NH2
QSQQTFSALWRLLAAN

SEQ ID NO: 121 - protein, 16 aa, Artificial Sequence
  Description of Artificial Sequence: Synthetic peptide
  N-term Ac
  MOD_RES (3)..(3): Alpha-Me R5-pentenyl-alanine olefin amino acids that are not connected by any crosslinker
  MOD_RES (7)..(7): Two pentenyl-alanine olefin side chains where one side chain is not crosslinked
  MOD_RES (11)..(11): Alpha-Me S5-pentenyl-alanine olefin amino acids that are not connected by any crosslinker
  MOD_RES (14)..(14): 2-aminoisobutyric acid
  C-term NH2
QSAQTFANLWALLXQN

SEQ ID NO: 122 - protein, 16 aa, Artificial Sequence
  Description of Artificial Sequence: Synthetic peptide
  N-term Ac
  MOD_RES (14)..(14): 2-aminoisobutyric acid
  C-term NH2
  Crosslinked Sequence
QSQQTFSNLWRLLXQN

SEQ ID NO: 123 - protein, 16 aa, Artificial Sequence
  Description of Artificial Sequence: Synthetic peptide
  N-terminus acetylated with heptanoic acid
  MOD_RES (4)..(4): Alpha-Me S5-pentenyl-alanine olefin amino acids that are not connected by any crosslinker
  MOD_RES (7)..(7): Alpha-Me R8-octenyl-alanine olefin amino acids that are not connected by any crosslinker
  MOD_RES (14)..(14): Alpha-Me S5-pentenyl-alanine olefin amino acids that are not connected by any crosslinker
  C-term NH2
QSQATFANLWRLLAQN

SEQ ID NO: 124 - protein, 16 aa, Artificial Sequence
  Description of Artificial Sequence: Synthetic peptide
  N-term Ac
  MOD_RES (7)..(7): Alpha-Me R8-octenyl-alanine olefin amino acids connected by an all-carbon i to i+7 crosslinker comprising one double bond
  MOD_RES (14)..(14): Alpha-Me S5-pentenyl-alanine olefin amino acids connected by an all-carbon i to i+4 crosslinker comprising one double bond
  C-term NH2
  Crosslinked Sequence
ASQQTFANLRWLLAQN

SEQ ID NO: 125 - protein, 15 aa, Artificial Sequence
  Description of Artificial Sequence: Synthetic peptide
  N-term Ac
  MOD_RES (7)..(7): Alpha-Me R8-octenyl-alanine olefin amino acids that are not connected by any crosslinker
  MOD_RES (14)..(14): Alpha-Me S5-pentenyl-alanine olefin amino acids that are not connected by any crosslinker
  C-term NH2
QSQQTFANLWRLLAQ

SEQ ID NO: 126 - protein, 15 aa, Artificial Sequence
  Description of Artificial Sequence: Synthetic peptide
  N-term Ac
  MOD_RES (7)..(7): Alpha-Me R8-octenyl-alanine olefin amino acids connected by an all-carbon i to i+7 crosslinker comprising one double bond
  MOD_RES (14)..(14): Alpha-Me S5-pentenyl-alanine olefin amino acids connected by an all-carbon i to i+4 crosslinker comprising one double bond
  C-term NH2
  Crosslinked Sequence
QSQQTFANLWRLLAQ

SEQ ID NO: 127 - protein, 16 aa, Artificial Sequence
  Description of Artificial Sequence: Synthetic peptide
  N-term Ac
  MOD_RES (7)..(7): Alpha-Me R8-octenyl-alanine olefin amino acids connected by an all-carbon i to i+7 crosslinker comprising one double bond
  MOD_RES (14)..(14): Alpha-Me S5-pentenyl-alanine olefin amino acids connected by an all-carbon i to i+4 crosslinker comprising one double bond
  C-term NH2
  Crosslinked Sequence
AAARAAAAAARAAAAA

SEQ ID NO: 128 - protein, 13 aa, Artificial Sequence
  Description of Artificial Sequence: Synthetic peptide
  N-term Ac
  C-term NH2
LTFEHYWAQLTSA

SEQ ID NO: 129 - protein, 13 aa, Artificial Sequence
  Description of Artificial Sequence: Synthetic peptide
  N-term Ac
  MOD_RES (4)..(4): Alpha-Me R8-octenyl-alanine olefin amino acids connected by an all-carbon i to i+7 crosslinker comprising one double bond
  MOD_RES (11)..(11): Alpha-Me S5-pentenyl-alanine olefin amino acids connected by an all-carbon i to i+4 crosslinker comprising one double bond
  C-term NH2
  Crosslinked Sequence
LTFAHYWAQLASA

SEQ ID NO: 130 - protein, 16 aa, Artificial Sequence
  Description of Artificial Sequence: Synthetic peptide
  N-term Ac
  C-term NH2
ASQQTFSNLWRLLPQN

SEQ ID NO: 131 - protein, 16 aa, Artificial Sequence
  Description of Artificial Sequence: Synthetic peptide
  N-term Ac
  MOD_RES (3)..(3): Alpha-Me S5-pentenyl-alanine olefin amino acids connected by an all-carbon i to i+4 crosslinker comprising one double bond
  MOD_RES (7)..(7): Two Pentenyl-alanine olefin side chains, each of which is crosslinked to another amino acid as indicated
  MOD_RES (11)..(11): Alpha-Me R5-pentenyl-alanine olefin amino acids connected by an all-carbon i to i+4 crosslinker comprising one double bond
  MOD_RES (14)..(14): 2-aminoisobutyric acid
  C-term NH2
  Crosslinked Sequence
QSAQTFANLWALLXQN

SEQ ID NO: 132 - protein, 16 aa, Artificial Sequence
  Description of Artificial Sequence: Synthetic peptide
  N-term Ac
  MOD_RES (7)..(7): 2-aminoisobutyric acid
  MOD_RES (14)..(14): 2-aminoisobutyric acid
  C-term NH2
  Crosslinked Sequence
QSQQTFXNLWRLLXQN

SEQ ID NO: 133 - protein, 16 aa, Artificial Sequence
  Description of Artificial Sequence: Synthetic peptide
  N-term Ac
  MOD_RES (7)..(7): Norleucine
  MOD_RES (14)..(14): Norleucine
  C-term NH2
  Crosslinked Sequence
QSQQTFLNLWRLLLQN

SEQ ID NO: 134 - protein, 16 aa, Artificial Sequence
  Description of Artificial Sequence: Synthetic peptide
  N-term Ac
  MOD_RES (7)..(7): Alpha-Me R8-octenyl-alanine olefin amino acids that are not connected by any crosslinker
  MOD_RES (14)..(14): 2-aminoisobutyric acid
  C-term NH2
QSQQTFANLWRLLXQN

SEQ ID NO: 135 - protein, 16 aa, Artificial Sequence
  Description of Artificial Sequence: Synthetic peptide
  N-term Ac
  MOD_RES (7)..(7): Alpha-Me R8-octenyl-alanine olefin amino acids that are not connected by any crosslinker
  MOD_RES (14)..(14): Norleucine
  C-term NH2
QSQQTFANLWRLLLQN

SEQ ID NO: 136 - protein, 16 aa, Artificial Sequence
  Description of Artificial Sequence: Synthetic peptide
  N-term Ac
  MOD_RES (7)..(7): 2-aminoisobutyric acid
  MOD_RES (14)..(14): Alpha-Me S5-pentenyl-alanine olefin amino acids that are not connected by any crosslinker
  C-term NH2
QSQQTFXNLWRLLAQN

SEQ ID NO: 137 - protein, 16 aa, Artificial Sequence
  Description of Artificial Sequence: Synthetic peptide
  N-term Ac
  MOD_RES (7)..(7): Norleucine
  MOD_RES (14)..(14): Alpha-Me S5-pentenyl-alanine olefin amino acids that are not connected by any crosslinker
  C-term NH2
QSQQTFLNLWRLLAQN

SEQ ID NO: 138 - protein, 16 aa, Artificial Sequence
  Description of Artificial Sequence: Synthetic peptide
  N-term Ac
  MOD_RES (7)..(7): Alpha-methyl R8-octenyl-alanine olefin amino acid connected by an all-carbon crosslinker that is fully saturated
  MOD_RES (10)..(10): 6cl-Trp
  MOD_RES (12)..(12): Norleucine
  MOD_RES (14)..(14): Alpha-methyl S5-pentenyl-alanine olefin amino acid connected by an all-carbon crosslinker that is fully saturated
  C-term NH2
  Crosslinked Sequence
QSQQTFANLWRLLAQN

SEQ ID NO: 139 - protein, 16 aa, Artificial Sequence
  Description of Artificial Sequence: Synthetic peptide
  N-term Ac
  MOD_RES (7)..(7): Alpha-methyl R8-octenyl-alanine olefin amino acid connected by an all-carbon crosslinker that is fully saturated
  MOD_RES (10)..(10): Me6cl-Trp
  MOD_RES (14)..(14): Alpha-methyl S5-pentenyl-alanine olefin amino acid connected by an all-carbon crosslinker that is fully saturated
  C-term NH2
  Crosslinked Sequence
QSQQTFANLWRLLAQN

SEQ ID NO: 140 - protein, 8 aa, Artificial Sequence
  Description of Artificial Sequence: Synthetic peptide
  N-term Ac
  MOD_RES (2)..(2): Norleucine
  MOD_RES (3)..(3): Alpha-Me S5-pentenyl-alanine olefin amino acids connected by an all-carbon i to i+4 crosslinker comprising one double bond
  MOD_RES (7)..(7): Alpha-Me S5-pentenyl-alanine olefin amino acids connected by an all-carbon i to i+4 crosslinker comprising one double bond
  C-term NH2
  Crosslinked Sequence
FLAYWEAL

SEQ ID NO: 141 - protein, 10 aa, Artificial Sequence
  Description of Artificial Sequence: Synthetic peptide
  N-term Ac
  MOD_RES (2)..(2): Alpha-Me R8-octenyl-alanine olefin amino acids connected by an all-carbon i to i+7 crosslinker comprising one double bond
  MOD_RES (9)..(9): Alpha-Me S5-pentenyl-alanine olefin amino acids connected by an all-carbon i to i+4 crosslinker comprising one double bond
  C-term NH2
  Crosslinked Sequence
FAAYWELLAA

SEQ ID NO: 142 - protein, 10 aa, Artificial Sequence
  Description of Artificial Sequence: Synthetic peptide
  N-term Ac
  MOD_RES (2)..(2): Alpha-Me R8-octenyl-alanine olefin amino acids connected by an all-carbon i to i+7 crosslinker comprising one double bond
  MOD_RES (9)..(9): Alpha-Me S5-pentenyl-alanine olefin amino acids connected by an all-carbon i to i+4 crosslinker comprising one double bond
  C-term NH2
  Crosslinked Sequence
FAAYWQLLAA

SEQ ID NO: 143 - protein, 14 aa, Artificial Sequence
  Description of Artificial Sequence: Synthetic peptide
  N-term Ac
  MOD_RES (1)..(1): Norleucine
  MOD_RES (5)..(5): Alpha-Me R8-octenyl-alanine olefin amino acids connected by an all-carbon i to i+7 crosslinker comprising one double bond
  MOD_RES (12)..(12): Alpha-Me S5-pentenyl-alanine olefin amino acids connected by an all-carbon i to i+4 crosslinker comprising one double bond
  C-term NH2
  Crosslinked Sequence
LPRFANYWELLAQN

SEQ ID NO: 144 - protein, 14 aa, Artificial Sequence
  Description of Artificial Sequence: Synthetic peptide
  N-term Ac
  MOD_RES (1)..(1): Norleucine
  MOD_RES (5)..(5): Alpha-Me R8-octenyl-alanine olefin amino acids connected by an all-carbon i to i+7 crosslinker comprising one double bond
  MOD_RES (12)..(12): Alpha-Me S5-pentenyl-alanine olefin amino acids connected by an all-carbon i to i+4 crosslinker comprising one double bond
  C-term NH2
  Crosslinked Sequence
LPRFADYWRLLAQN

SEQ ID NO: 145 - protein, 13 aa, Artificial Sequence
  Description of Artificial Sequence: Synthetic peptide
  N-term Ac
  MOD_RES (1)..(1): Norleucine
  MOD_RES (5)..(5): Alpha-Me R8-octenyl-alanine olefin amino acids connected by an all-carbon i to i+7 crosslinker comprising one double bond
  MOD_RES (12)..(12): Alpha-Me S5-pentenyl-alanine olefin amino acids connected by an all-carbon i to i+4 crosslinker comprising one double bond
  C-term NH2
  Crosslinked Sequence
LPRFANYWRLLAQ

SEQ ID NO: 146 - protein, 12 aa, Artificial Sequence
  Description of Artificial Sequence: Synthetic peptide
  N-term Ac
  MOD_RES (1)..(1): Norleucine
  MOD_RES (5)..(5): Alpha-Me R8-octenyl-alanine olefin amino acids connected by an all-carbon i to i+7 crosslinker comprising one double bond
  MOD_RES (12)..(12): Alpha-Me S5-pentenyl-alanine olefin amino acids connected by an all-carbon i to i+4 crosslinker comprising one double bond
  C-term NH2
  Crosslinked Sequence
LPRFANYWRLLA

SEQ ID NO: 147 - protein, 16 aa, Artificial Sequence
  Description of Artificial Sequence: Synthetic peptide
  N-term Ac
  MOD_RES (7)..(7): Alpha-Me R8-octenyl-alanine olefin amino acids connected by an all-carbon i to i+7 crosslinker comprising one double bond
  MOD_RES (14)..(14): Alpha-Me S5-pentenyl-alanine olefin amino acids connected by an all-carbon i to i+4 crosslinker comprising one double bond
  C-term NH2
  Crosslinked Sequence
QSQQTFADLWRLLAQN

SEQ ID NO: 148 - protein, 16 aa, Artificial Sequence
  Description of Artificial Sequence: Synthetic peptide
  N-term Ac
  MOD_RES (7)..(7): Alpha-Me R8-octenyl-alanine olefin amino acids connected by an all-carbon i to i+7 crosslinker comprising one double bond
  MOD_RES (14)..(14): Alpha-Me S5-pentenyl-alanine olefin amino acids connected by an all-carbon i to i+4 crosslinker comprising one double bond
  C-term NH2
  Crosslinked Sequence
QSQQTFANLWRLLAEN

SEQ ID NO: 149 - protein, 16 aa, Artificial Sequence
  Description of Artificial Sequence: Synthetic peptide
  N-term Ac
  MOD_RES (7)..(7): Alpha-Me R8-octenyl-alanine olefin amino acids connected by an all-carbon i to i+7 crosslinker comprising one double bond
  MOD_RES (14)..(14): Alpha-Me S5-pentenyl-alanine olefin amino acids connected by an all-carbon i to i+4 crosslinker comprising one double bond
  C-term NH2
  Crosslinked Sequence
QSQQTFANLWRLLAQD

SEQ ID NO: 150 - protein, 15 aa, Artificial Sequence
  Description of Artificial Sequence: Synthetic peptide
  N-term Ac
  MOD_RES (7)..(7): Alpha-Me R8-octenyl-alanine olefin amino acids connected by an all-carbon i to i+7 crosslinker comprising one double bond
  MOD_RES (14)..(14): Alpha-Me S5-pentenyl-alanine olefin amino acids connected by an all-carbon i to i+4 crosslinker comprising one double bond
  C-term NH2
  Crosslinked Sequence
QSQQTFANLWRLLAS

SEQ ID NO: 151 - protein, 16 aa, Artificial Sequence
  Description of Artificial Sequence: Synthetic peptide
  N-term Ac
  MOD_RES (7)..(7): Alpha-Me R8-octenyl-alanine olefin amino acids connected by an all-carbon i to i+7 crosslinker comprising one double bond
  MOD_RES (14)..(14): Alpha-Me S5-pentenyl-alanine olefin amino acids connected by an all-carbon i to i+4 crosslinker comprising one double bond
  C-term NH2
  Crosslinked Sequence
ESQQTFANLWRLLAQN

SEQ ID NO: 152 - protein, 12 aa, Artificial Sequence
  Description of Artificial Sequence: Synthetic peptide
  N-term Ac
  MOD_RES (4)..(4): Alpha-Me R8-octenyl-alanine olefin amino acids connected by an all-carbon i to i+7 crosslinker comprising one double bond
  MOD_RES (9)..(9): Norleucine
  MOD_RES (11)..(11): Alpha-Me S5-pentenyl-alanine olefin amino acids connected by an all-carbon i to i+4 crosslinker comprising one double bond
  C-term NH2
  Crosslinked Sequence
LTFANLWRLLAQ

SEQ ID NO: 153 - protein, 12 aa, Artificial Sequence
  Description of Artificial Sequence: Synthetic peptide
  N-term Ac
  MOD_RES (4)..(4): Alpha-Me R8-octenyl-alanine olefin amino acids connected by an all-carbon i to i+7 crosslinker comprising one double bond
  MOD_RES (9)..(9): Norleucine
  MOD_RES (11)..(11): Alpha-Me S5-pentenyl-alanine olefin amino acids connected by an all-carbon i to i+4 crosslinker comprising one double bond
  C-term NH2
  Crosslinked Sequence
LRFANLWRLLAQ

SEQ ID NO: 154 - protein, 16 aa, Artificial Sequence
  Description of Artificial Sequence: Synthetic peptide
  N-term Ac
  MOD_RES (7)..(7): Alpha-Me R8-octenyl-alanine olefin amino acids connected by an all-carbon i to i+7 crosslinker comprising one double bond
  MOD_RES (12)..(12): Norleucine
  MOD_RES (14)..(14): Alpha-Me S5-pentenyl-alanine olefin amino acids connected by an all-carbon i to i+4 crosslinker comprising one double bond
  C-term NH2
  Crosslinked Sequence
QSQQTFANWWRLLAQN

SEQ ID NO: 155 - protein, 15 aa, Artificial Sequence
  Description of Artificial Sequence: Synthetic peptide
  N-term Ac
  MOD_RES (7)..(7): Alpha-Me R8-octenyl-alanine olefin amino acids connected by an all-carbon i to i+7 crosslinker comprising one double bond
  MOD_RES (12)..(12): Norleucine
  MOD_RES (14)..(14): Alpha-Me S5-pentenyl-alanine olefin amino acids connected by an all-carbon i to i+4 crosslinker comprising one double bond
  C-term NH2
  Crosslinked Sequence
QSQQTFANLWRLLAQ

SEQ ID NO: 156 - protein, 13 aa, Artificial Sequence
  Description of Artificial Sequence: Synthetic peptide
  N-term Ac
  MOD_RES (4)..(4): Alpha-Me R8-octenyl-alanine olefin amino acids connected by an all-carbon i to i+7 crosslinker comprising one double bond
  MOD_RES (9)..(9): Norleucine
  MOD_RES (11)..(11): Alpha-Me S5-pentenyl-alanine olefin amino acids connected by an all-carbon i to i+4 crosslinker comprising one double bond
  C-term NH2
  Crosslinked Sequence
QTFANLWRLLAQN

SEQ ID NO: 157 - protein, 14 aa, Artificial Sequence
  Description of Artificial Sequence: Synthetic peptide
  N-term Ac
  MOD_RES (1)..(1): Norleucine
  MOD_RES (5)..(5): Alpha-Me R8-octenyl-alanine olefin amino acids connected by an all-carbon i to i+7 crosslinker comprising one double bond
  MOD_RES (12)..(12): Alpha-Me S5-pentenyl-alanine olefin amino acids connected by an all-carbon i to i+4 crosslinker comprising one double bond
  C-term NH2
  Crosslinked Sequence
LPRFANWWRLLAQN

SEQ ID NO: 158 - protein, 13 aa, Artificial Sequence
  Description of Artificial Sequence: Synthetic peptide
  N-term Ac
  MOD_RES (1)..(1): Norleucine
  MOD_RES (5)..(5): Alpha-Me R8-octenyl-alanine olefin amino acids connected by an all-carbon i to i+7 crosslinker comprising one double bond
  MOD_RES (12)..(12): Alpha-Me S5-pentenyl-alanine olefin amino acids connected by an all-carbon i to i+4 crosslinker comprising one double bond
  C-term NH2
  Crosslinked Sequence
LPRFANWWRLLAA

SEQ ID NO: 159 - protein, 12 aa, Artificial Sequence
  Description of Artificial Sequence: Synthetic peptide
  N-term Ac
  C-term NH2
TSFAEYWNLLSP

SEQ ID NO: 160 - protein, 12 aa, Artificial Sequence
  Description of Artificial Sequence: Synthetic peptide
  N-term Ac
  MOD_RES (4)..(4): Alpha-Me R8-octenyl-alanine olefin amino acids connected by an all-carbon i to i+7 crosslinker comprising one double bond
  MOD_RES (11)..(11): Alpha-Me S5-pentenyl-alanine olefin amino acids connected by an all-carbon i to i+4 crosslinker comprising one double bond
  C-term NH2
  Crosslinked Sequence
QTFAHWWSQLAS

SEQ ID NO: 161 - protein, 8 aa, Artificial Sequence
  Description of Artificial Sequence: Synthetic peptide
  N-term Ac
  MOD_RES (3)..(3): Alpha-Me S5-pentenyl-alanine olefin amino acids connected by an all-carbon i to i+4 crosslinker comprising one double bond
  MOD_RES (7)..(7): Alpha-Me S5-pentenyl-alanine olefin amino acids connected by an all-carbon i to i+4 crosslinker comprising one double bond
  C-term NH2
  Crosslinked Sequence
FMAYWEAL

SEQ ID NO: 162 - protein, 12 aa, Artificial Sequence
  Description of Artificial Sequence: Synthetic peptide
  N-term Ac
  C-term NH2
QTFEHWWSQLLS

SEQ ID NO: 163 - protein, 16 aa, Artificial Sequence
  Description of Artificial Sequence: Synthetic peptide
  N-term Ac
  MOD_RES (7)..(7): Alpha-Me R8-octenyl-alanine olefin amino acids connected by an all-carbon i to i+7 crosslinker comprising one double bond
  MOD_RES (10)..(10): Alpha-Me-Trp
  MOD_RES (13)..(13): Norleucine
  MOD_RES (14)..(14): Alpha-Me S5-pentenyl-alanine olefin amino acids connected by an all-carbon i to i+4 crosslinker comprising one double bond
  C-term NH2
  Crosslinked Sequence
QSQQTFANLWRLLAQN

SEQ ID NO: 164 - protein, 8 aa, Artificial Sequence
  Description of Artificial Sequence: Synthetic peptide
  N-term Ac
  MOD_RES (3)..(3): 2-aminoisobutyric acid
  MOD_RES (5)..(5): 6cl-Trp
  MOD_RES (7)..(7): Aminocyclopropane carboxylic acid residue
  C-term NH2
  Crosslinked Sequence
FMXYWEXL

SEQ ID NO: 165 - protein, 8 aa, Artificial Sequence
  Description of Artificial Sequence: Synthetic peptide
  N-term Ac
  MOD_RES (2)..(2): Norleucine
  MOD_RES (3)..(3): Alpha-Me S5-pentenyl-alanine olefin amino acids connected by an all-carbon i to i+4 crosslinker comprising one double bond
  MOD_RES (5)..(5): 6cl-Trp
  MOD_RES (7)..(7): Alpha-Me S5-pentenyl-alanine olefin amino acids connected by an all-carbon i to i+4 crosslinker comprising one double bond
  C-term NH2
  Crosslinked Sequence
FLAYWEAL

SEQ ID NO: 166 - protein, 9 aa, Artificial Sequence
  Description of Artificial Sequence: Synthetic peptide
  N-term Ac
  MOD_RES (2)..(2): Alpha-methyl R8-octenyl-alanine olefin amino acid connected by an all-carbon crosslinker comprising one double bond in cis configuration
  MOD_RES (5)..(5): 6cl-Trp
  MOD_RES (7)..(7): Aminocyclopropane carboxylic acid residue
  MOD_RES (9)..(9): Alpha-methyl S5-pentenyl-alanine olefin amino acid connected by an all-carbon crosslinker comprising one double bond in cis configuration
  C-term NH2
  Crosslinked Sequence
FAAYWEXLA

SEQ ID NO: 167 - protein, 10 aa, Artificial Sequence
  Description of Artificial Sequence: Synthetic peptide
  N-term Ac
  MOD_RES (2)..(2): Alpha-Me R8-octenyl-alanine olefin amino acids connected by an all-carbon i to i+7 crosslinker comprising one double bond
  MOD_RES (5)..(5): 6cl-Trp
  MOD_RES (7)..(7): Aminocyclopropane carboxylic acid residue
  MOD_RES (9)..(9): Alpha-Me S5-pentenyl-alanine olefin amino acids connected by an all-carbon i to i+4 crosslinker comprising one double bond
  C-term NH2
  Crosslinked Sequence
FAAYWEXLAA

SEQ ID NO: 168 - protein, 14 aa, Artificial Sequence
  Description of Artificial Sequence: Synthetic peptide
  N-term Ac
  MOD_RES (1)..(1): Norleucine
  MOD_RES (5)..(5): Alpha-Me R8-octenyl-alanine olefin amino acids connected by an all-carbon i to i+7 crosslinker comprising one double bond
  MOD_RES (8)..(8): 6cl-Trp
  MOD_RES (12)..(12): Alpha-Me S5-pentenyl-alanine olefin amino acids connected by an all-carbon i to i+4 crosslinker comprising one double bond
  C-term NH2
  Crosslinked Sequence
LPRFANYWRLLAQN

SEQ ID NO: 169 - protein, 11 aa, Artificial Sequence
  Description of Artificial Sequence: Synthetic peptide
  N-term Ac
  MOD_RES (3)..(3): Alpha-Me R8-octenyl-alanine olefin amino acids connected by an all-carbon i to i+7 crosslinker comprising one double bond
  MOD_RES (10)..(10): Alpha-Me S5-pentenyl-alanine olefin amino acids connected by an all-carbon i to i+4 crosslinker comprising one double bond
  C-term NH2
  Crosslinked Sequence
AFAAAWALAAA

SEQ ID NO: 170 - protein, 11 aa, Artificial Sequence
  Description of Artificial Sequence: Synthetic peptide
  N-term Ac
  MOD_RES (3)..(3): Alpha-Me R8-octenyl-alanine olefin amino acids connected by an all-carbon i to i+7 crosslinker comprising one double bond
  MOD_RES (10)..(10): Alpha-Me S5-pentenyl-alanine olefin amino acids connected by an all-carbon i to i+4 crosslinker comprising one double bond
  C-term NH2
  Crosslinked Sequence
TFAAAWRLAAQ

SEQ ID NO: 171 - protein, 11 aa, Artificial Sequence
  Description of Artificial Sequence: Synthetic peptide
  N-term Pr
  MOD_RES (3)..(3): Alpha-Me R8-octenyl-alanine olefin amino acids connected by an all-carbon i to i+7 crosslinker comprising one double bond
  MOD_RES (10)..(10): Alpha-Me S5-pentenyl-alanine olefin amino acids connected by an all-carbon i to i+4 crosslinker comprising one double bond
  C-term NH2
  Crosslinked Sequence
TFAAAWRLAAQ

SEQ ID NO: 172 - protein, 16 aa, Artificial Sequence
  Description of Artificial Sequence: Synthetic peptide
  N-term Ac
  MOD_RES (7)..(7): Alpha-methyl R8-octenyl-alanine olefin amino acid connected by an all-carbon crosslinker that is fully saturated
  MOD_RES (12)..(12): Norleucine
  MOD_RES (14)..(14): Alpha-methyl S5-pentenyl-alanine olefin amino acid connected by an all-carbon crosslinker that is fully saturated
  C-term NH2
  Crosslinked Sequence
QSQQTFANLWRLLAQN

SEQ ID NO: 173 - protein, 13 aa, Artificial Sequence
  Description of Artificial Sequence: Synthetic peptide
  N-term Ac
  MOD_RES (4)..(4): Alpha-methyl R8-octenyl-alanine olefin amino acid connected by an all-carbon crosslinker that is fully saturated
  MOD_RES (11)..(11): Alpha-methyl S5-pentenyl-alanine olefin amino acid connected by an all-carbon crosslinker that is fully saturated
  C-term NH2
  Crosslinked Sequence
LTFAHYWAQLASA

SEQ ID NO: 174 - protein, 14 aa, Artificial Sequence
  Description of Artificial Sequence: Synthetic peptide
  N-term Ac
  MOD_RES (1)..(1): Norleucine
  MOD_RES (5)..(5): Alpha-methyl R8-octenyl-alanine olefin amino acid connected by an all-carbon crosslinker that is fully saturated
  MOD_RES (12)..(12): Alpha-methyl S5-pentenyl-alanine olefin amino acid connected by an all-carbon crosslinker that is fully saturated
  C-term NH2
  Crosslinked Sequence
LPRFANYWRLLAQN

SEQ ID NO: 175 - protein, 14 aa, Artificial Sequence
  Description of Artificial Sequence: Synthetic peptide
  N-term Ac
  MOD_RES (1)..(1): Norleucine
  MOD_RES (5)..(5): Alpha-methyl R8-octenyl-alanine olefin amino acid connected by an all-carbon crosslinker that is fully saturated
  MOD_RES (8)..(8): 6cl-Trp
  MOD_RES (12)..(12): Alpha-methyl S5-pentenyl-alanine olefin amino acid connected by an all-carbon crosslinker that is fully saturated
  C-term NH2
  Crosslinked Sequence
LPRFANYWRLLAQN

SEQ ID NO: 176 - protein, 12 aa, Artificial Sequence
  Description of Artificial Sequence: Synthetic peptide
  N-term Ac
  MOD_RES (4)..(4): Alpha-methyl R8-octenyl-alanine olefin amino acid connected by an all-carbon crosslinker that is fully saturated
  MOD_RES (7)..(7): 6cl-Trp
  MOD_RES (11)..(11): Alpha-methyl S5-pentenyl-alanine olefin amino acid connected by an all-carbon crosslinker that is fully saturated
  C-term NH2
  Crosslinked Sequence
LTFAHYWAQLAS

SEQ ID NO: 177 - protein, 16 aa, Artificial Sequence
  Description of Artificial Sequence: Synthetic peptide
  N-term Ac
  MOD_RES (3)..(3): Alpha-methyl S5-pentenyl-alanine olefin amino acid connected by an all-carbon crosslinker that is fully saturated
  MOD_RES (7)..(7): Two pentenyl-alanine olefin side chains, each of which is crosslinked to another amino acid as indicated via fully saturated hydrocarbon crosslinks
  MOD_RES (14)..(14): Alpha-methyl S8-octenyl-alanine olefin amino acid connected by an all-carbon crosslinker that is fully saturated
  C-term NH2
  Crosslinked Sequence
QSAQTFANLWRLLAQN

SEQ ID NO: 178 - protein, 12 aa, Artificial Sequence
  Description of Artificial Sequence: Synthetic peptide
  N-term Ac
  MOD_RES (4)..(4): Alpha-methyl R8-octenyl-alanine olefin amino acid connected by an all-carbon crosslinker that is fully saturated
  MOD_RES (7)..(7): 6cl-Trp
  MOD_RES (11)..(11): Alpha-methyl S5-pentenyl-alanine olefin amino acid connected by an all-carbon crosslinker that is fully saturated
  C-term NH2
  Crosslinked Sequence
LTFAHYWRQLAS

SEQ ID NO: 179 - protein, 16 aa, Artificial Sequence
  Description of Artificial Sequence: Synthetic peptide
  N-term Ac
  MOD_RES (7)..(7): Alpha-methyl R8-octenyl-alanine olefin amino acid connected by an all-carbon crosslinker that is fully saturated
  MOD_RES (10)..(10): 6cl-Trp
  MOD_RES (14)..(14): Alpha-methyl S5-pentenyl-alanine olefin amino acid connected by an all-carbon crosslinker that is fully saturated
  C-term NH2
  Crosslinked Sequence
QSQQTFANLWRLLAQN

SEQ ID NO: 180 - protein, 16 aa, Artificial Sequence
  Description of Artificial Sequence: Synthetic peptide
  N-term Ac
  MOD_RES (1)..(1): Alpha-methyl R8-octenyl-alanine olefin amino acid connected by an all-carbon crosslinker that is fully saturated
  MOD_RES (8)..(8): Alpha-methyl S5-pentenyl-alanine olefin amino acid connected by an all-carbon crosslinker that is fully saturated
  MOD_RES (14)..(14): 2-aminoisobutyric acid
  C-term NH2
  Crosslinked Sequence
ASQQTFSALWRLLXQN

SEQ ID NO: 181 - protein, 12 aa, Artificial Sequence
  Description of Artificial Sequence: Synthetic peptide
  N-term Ac
  MOD_RES (4)..(4): Alpha-methyl R8-octenyl-alanine olefin amino acid connected by an all-carbon crosslinker that is fully saturated
  MOD_RES (11)..(11): Alpha-methyl S5-pentenyl-alanine olefin amino acid connected by an all-carbon crosslinker that is fully saturated
  C-term NH2
  Crosslinked Sequence
LTFAHYWAQLAS

SEQ ID NO: 182 - protein, 12 aa, Artificial Sequence
  Description of Artificial Sequence: Synthetic peptide
  N-term Ac
  MOD_RES (4)..(4): Alpha-methyl R8-octenyl-alanine olefin amino acid connected by an all-carbon crosslinker that is fully saturated
  MOD_RES (11)..(11): Alpha-methyl S5-pentenyl-alanine olefin amino acid connected by an all-carbon crosslinker that is fully saturated
  C-term NH2
  Crosslinked Sequence
TSFAQYWNLLAP

SEQ ID NO: 183 - protein, 12 aa, Artificial Sequence
  Description of Artificial Sequence: Synthetic peptide
  N-term Ac
  C-term NH2
LTFEHYWAQLTS

SEQ ID NO: 184 - protein, 9 aa, Artificial Sequence
  Description of Artificial Sequence: Synthetic peptide
  N-term Ac
  MOD_RES (2)..(2): Alpha-methyl R8-octenyl-alanine olefin amino acid connected by an all-carbon crosslinker comprising one double bond in trans configuration
  MOD_RES (5)..(5): 6cl-Trp
  MOD_RES (7)..(7): Aminocyclopropane carboxylic acid residue
  MOD_RES (9)..(9): Alpha-methyl S5-pentenyl-alanine olefin amino acid connected by an all-carbon crosslinker comprising one double bond in trans configuration
  C-term NH2
  Crosslinked Sequence
FAAYWEXLA

SEQ ID NO: 185 - protein, 11 aa, Artificial Sequence
  Description of Artificial Sequence: Synthetic peptide
  N-term Ac
  MOD_RES (3)..(3): Alpha-Me R8-octenyl-alanine olefin amino acids connected by an all-carbon i to i+7 crosslinker comprising one double bond
  MOD_RES (10)..(10): Alpha-Me S5-pentenyl-alanine olefin amino acids connected by an all-carbon i to i+4 crosslinker comprising one double bond
  C-term NH2
  Crosslinked Sequence
AFAAAWALAAA

SEQ ID NO: 186 - protein, 11 aa, Artificial Sequence
  Description of Artificial Sequence: Synthetic peptide
  N-term Ac
  MOD_RES (3)..(3): Alpha-Me R8-octenyl-alanine olefin amino acids connected by an all-carbon i to i+7 crosslinker comprising one double bond
  MOD_RES (10)..(10): Alpha-Me S5-pentenyl-alanine olefin amino acids connected by an all-carbon i to i+4 crosslinker comprising one double bond
  C-term NH2
  Crosslinked Sequence
TFAAAWRLAAQ

SEQ ID NO: 187 - protein, 11 aa, Artificial Sequence
  Description of Artificial Sequence: Synthetic peptide
  N-term Pr
  MOD_RES (3)..(3): Alpha-Me R8-octenyl-alanine olefin amino acids connected by an all-carbon i to i+7 crosslinker comprising one double bond
  MOD_RES (10)..(10): Alpha-Me S5-pentenyl-alanine olefin amino acids connected by an all-carbon i to i+4 crosslinker comprising one double bond
  C-term NH2
  Crosslinked Sequence
TFAAAWRLAAQ

SEQ ID NO: 188 - protein, 12 aa, Artificial Sequence
  Description of Artificial Sequence: Synthetic peptide
  N-term Ac
  MOD_RES (4)..(4): Alpha-methyl R8-octenyl-alanine olefin amino acid connected by an all-carbon crosslinker comprising one double bond in trans configuration
  MOD_RES (11)..(11): Alpha-methyl S5-pentenyl-alanine olefin amino acid connected by an all-carbon crosslinker comprising one double bond in trans configuration
  C-term NH2
  Crosslinked Sequence
LTFAHYWAQLAS

SEQ ID NO: 189 - protein, 23 aa, Artificial Sequence
  Description of Artificial Sequence: Synthetic peptide
  N-term Ac
  MOD_RES (7)..(7): Beta-Ala
  MOD_RES (14)..(14): Alpha-Me R8-octenyl-alanine olefin amino acids connected by an all-carbon i to i+7 crosslinker comprising one double bond
  MOD_RES (21)..(21): Alpha-Me S5-pentenyl-alanine olefin amino acids connected by an all-carbon i to i+4 crosslinker comprising one double bond
  C-term NH2
  Crosslinked Sequence
CCPGCCAQSQQTFANLWRLLAQN

SEQ ID NO: 190 - protein, 23 aa, Artificial Sequence
  Description of Artificial Sequence: Synthetic peptide
  N-term Ac
  MOD_RES (7)..(7): Beta-Ala
  MOD_RES (14)..(14): Alpha-Me R8-octenyl-alanine olefin amino acids connected by an all-carbon i to i+7 crosslinker comprising one double bond
  MOD_RES (21)..(21): Alpha-Me S5-pentenyl-alanine olefin amino acids connected by an all-carbon i to i+4 crosslinker comprising one double bond
  C-term NH2
  Crosslinked Sequence
CCPGCCAQSQQTAANLWRLLAQN

SEQ ID NO: 191 - protein, 21 aa, Artificial Sequence
  Description of Artificial Sequence: Synthetic peptide
  N-term Ac
  MOD_RES (7)..(7): Beta-Ala
  MOD_RES (8)..(8): Norleucine
  MOD_RES (12)..(12): Alpha-Me R8-octenyl-alanine olefin amino acids connected by an all-carbon i to i+7 crosslinker comprising one double bond
  MOD_RES (19)..(19): Alpha-Me S5-pentenyl-alanine olefin amino acids connected by an all-carbon i to i+4 crosslinker comprising one double bond
  C-term NH2
  Crosslinked Sequence
CCPGCCALPRFANYWRLLAQN

SEQ ID NO: 192 - protein, 12 aa, Artificial Sequence
  Description of Artificial Sequence: Synthetic peptide
  N-term Ac
  MOD_RES (4)..(4): Alpha-Me R8-octenyl-alanine olefin amino acids that are not connected by any crosslinker
  MOD_RES (11)..(11): Alpha-Me S5-pentenyl-alanine olefin amino acids that are not connected by any crosslinker
  C-term NH2
LTFAHYWAQLAS

SEQ ID NO: 193 - protein, 9 aa, Artificial Sequence
  Description of Artificial Sequence: Synthetic peptide
  N-term Ac
  MOD_RES (2)..(2): Alpha-methyl R8-octenyl-alanine olefin amino acid connected by an all-carbon crosslinker that is fully saturated
  MOD_RES (5)..(5): 6cl-Trp
  MOD_RES (7)..(7): Aminocyclopropane carboxylic acid residue
  MOD_RES (9)..(9): Alpha-methyl S5-pentenyl-alanine olefin amino acid connected by an all-carbon crosslinker that is fully saturated
  C-term NH2
  Crosslinked Sequence
FAHYWRXLA

SEQ ID NO: 194 - protein, 12 aa, Artificial Sequence
  Description of Artificial Sequence: Synthetic peptide
  N-term Ac
  MOD_RES (4)..(4): Alpha-methyl R8-octenyl-alanine olefin amino acid connected by an all-carbon crosslinker that is fully saturated
  MOD_RES (11)..(11): Alpha-methyl S5-pentenyl-alanine olefin amino acid connected by an all-carbon crosslinker that is fully saturated
  C-term NH2
  Crosslinked Sequence
QTFAHWWSQLAS

SEQ ID NO: 195 - protein, 12 aa, Artificial Sequence
  Description of Artificial Sequence: Synthetic peptide
  N-term Ac
  MOD_RES (4)..(4): Alpha-Me R8-octenyl-alanine olefin amino acids connected by an all-carbon i to i+7 crosslinker comprising one double bond
  MOD_RES (11)..(11): Alpha-Me S5-pentenyl-alanine olefin amino acids connected by an all-carbon i to i+4 crosslinker comprising one double bond
  C-term NH2
  Crosslinked Sequence
LTAAHYWRQLAS

SEQ ID NO: 196 - protein, 16 aa, Artificial Sequence
  Description of Artificial Sequence: Synthetic peptide
  N-term Ac
  MOD_RES (2)..(2): Alpha-Me R8-octenyl-alanine olefin amino acids connected by an all-carbon i to i+7 crosslinker comprising one double bond
  MOD_RES (9)..(9): Alpha-Me S5-pentenyl-alanine olefin amino acids connected by an all-carbon i to i+4 crosslinker comprising one double bond
  MOD_RES (14)..(14): 2-aminoisobutyric acid
  C-term NH2
  Crosslinked Sequence
QAQQTFSNAWRLLXQN

SEQ ID NO: 197 - protein, 16 aa, Artificial Sequence
  Description of Artificial Sequence: Synthetic peptide
  N-term Ac
  MOD_RES (5)..(5): Alpha-Me R8-octenyl-alanine olefin amino acids connected by an all-carbon i to i+7 crosslinker comprising one double bond
  MOD_RES (12)..(12): Alpha-Me S5-pentenyl-alanine olefin amino acids connected by an all-carbon i to i+4 crosslinker comprising one double bond
  MOD_RES (14)..(14): 2-aminoisobutyric acid
  C-term NH2
  Crosslinked Sequence
QSQQAFSNLWRALXQN

SEQ ID NO: 198 - protein, 10 aa, Artificial Sequence
  Description of Artificial Sequence: Synthetic peptide
  N-term Ac
  MOD_RES (2)..(2): Alpha-Me R8-octenyl-alanine olefin amino acids connected by an all-carbon i to i+7 crosslinker comprising one double bond
  MOD_RES (7)..(7): Aminocyclopropane carboxylic acid residue
  MOD_RES (9)..(9): Alpha-Me S5-pentenyl-alanine olefin amino acids connected by an all-carbon i to i+4 crosslinker comprising one double bond
  C-term NH2
  Crosslinked Sequence
FAAYWEXLAA

SEQ ID NO: 199 - protein, 10 aa, Artificial Sequence
  Description of Artificial Sequence: Synthetic peptide
  N-term Ac
  MOD_RES (2)..(2): Alpha-Me R8-octenyl-alanine olefin amino acids connected by an all-carbon i to i+7 crosslinker comprising one double bond
  MOD_RES (7)..(7): Aminocyclopropane carboxylic acid residue
  MOD_RES (9)..(9): Alpha-Me S5-pentenyl-alanine olefin amino acids connected by an all-carbon i to i+4 crosslinker comprising one double bond
  C-term NH2
  Crosslinked Sequence
FAAYWEXLAS

SEQ ID NO: 200 - protein, 10 aa, Artificial Sequence
  Description of Artificial Sequence: Synthetic peptide
  N-term Ac
  MOD_RES (2)..(2): Alpha-Me R8-octenyl-alanine olefin amino acids connected by an all-carbon i to i+7 crosslinker comprising one double bond
  MOD_RES (7)..(7): Aminocyclopropane carboxylic acid residue
  MOD_RES (9)..(9): Alpha-Me S5-pentenyl-alanine olefin amino acids connected by an all-carbon i to i+4 crosslinker comprising one double bond
  C-term NH2
  Crosslinked Sequence
FAAYWEXLAQ

SEQ ID NO: 201 - protein, 10 aa, Artificial Sequence
  Description of Artificial Sequence: Synthetic peptide
  N-term Ac
  MOD_RES (2)..(2): Alpha-Me R8-octenyl-alanine olefin amino acids connected by an all-carbon i to i+7 crosslinker comprising one double bond
  MOD_RES (7)..(7): 2-aminoisobutyric acid
  MOD_RES (9)..(9): Alpha-Me S5-pentenyl-alanine olefin amino acids connected by an all-carbon i to i+4 crosslinker comprising one double bond
  C-term NH2
  Crosslinked Sequence
FAAYWEXLAS

SEQ ID NO: 202 - protein, 10 aa, Artificial Sequence
  Description of Artificial Sequence: Synthetic peptide
  N-term Ac
  MOD_RES (2)..(2): Alpha-Me R8-octenyl-alanine olefin amino acids connected by an all-carbon i to i+7 crosslinker comprising one double bond
  MOD_RES (9)..(9): Alpha-Me S5-pentenyl-alanine olefin amino acids connected by an all-carbon i to i+4 crosslinker comprising one double bond
  C-term NH2
  Crosslinked Sequence
FAAYWEALAS

SEQ ID NO: 203 - protein, 10 aa, Artificial Sequence
  Description of Artificial Sequence: Synthetic peptide
  N-term Ac
  MOD_RES (2)..(2): Alpha-Me R8-octenyl-alanine olefin amino acids connected by an all-carbon i to i+7 crosslinker comprising one double bond
  MOD_RES (9)..(9): Alpha-Me S5-pentenyl-alanine olefin amino acids connected by an all-carbon i to i+4 crosslinker comprising one double bond
  C-term NH2
  Crosslinked Sequence
FAAYWEQLAS

SEQ ID NO: 204 - protein, 10 aa, Artificial Sequence
  Description of Artificial Sequence: Synthetic peptide
  N-term Ac
  MOD_RES (2)..(2): Alpha-Me R8-octenyl-alanine olefin amino acids connected by an all-carbon i to i+7 crosslinker comprising one double bond
  MOD_RES (9)..(9): Alpha-Me S5-pentenyl-alanine olefin amino acids connected by an all-carbon i to i+4 crosslinker comprising one double bond
  C-term NH2
  Crosslinked Sequence
FAHYWEQLAS

SEQ ID NO: 205 - protein, 10 aa, Artificial Sequence
  Description of Artificial Sequence: Synthetic peptide
  N-term Ac
  MOD_RES (2)..(2): Alpha-Me R8-octenyl-alanine olefin amino acids connected by an all-carbon i to i+7 crosslinker comprising one double bond
  MOD_RES (9)..(9): Alpha-Me S5-pentenyl-alanine olefin amino acids connected by an all-carbon i to i+4 crosslinker comprising one double bond
  C-term NH2
  Crosslinked Sequence
FAHYWAQLAS

SEQ ID NO: 206 - protein, 10 aa, Artificial Sequence
  Description of Artificial Sequence: Synthetic peptide
  N-term Ac
  MOD_RES (2)..(2): Alpha-Me R8-octenyl-alanine olefin amino acids connected by an all-carbon i to i+7 crosslinker comprising one double bond
  MOD_RES (7)..(7): Aminocyclopropane carboxylic acid residue
  MOD_RES (9)..(9): Alpha-Me S5-pentenyl-alanine olefin amino acids connected by an all-carbon i to i+4 crosslinker comprising one double bond
  C-term NH2
  Crosslinked Sequence
FAHYWAXLAS

SEQ ID NO: 207 - protein, 10 aa, Artificial Sequence
  Description of Artificial Sequence: Synthetic peptide
  N-term Ac
  MOD_RES (2)..(2): Alpha-Me R8-octenyl-alanine olefin amino acids connected by an all-carbon i to i+7 crosslinker comprising one double bond
  MOD_RES (7)..(7): Aminocyclopropane carboxylic acid residue
  MOD_RES (9)..(9): Alpha-Me S5-pentenyl-alanine olefin amino acids connected by an all-carbon i to i+4 crosslinker comprising one double bond
  C-term NH2
  Crosslinked Sequence
FAHYWRXLAS

SEQ ID NO: 208 - protein, 10 aa, Artificial Sequence
  Description of Artificial Sequence: Synthetic peptide
  N-term Ac
  MOD_RES (2)..(2): Alpha-Me R8-octenyl-alanine olefin amino acids connected by an all-carbon i to i+7 crosslinker comprising one double bond
  MOD_RES (7)..(7): Aminocyclopropane carboxylic acid residue
  MOD_RES (9)..(9): Alpha-hydrogen S5-pentenyl-alanine olefin amino acid connected by an all-carbon crosslinker comprising one double bond
  C-term NH2
  Crosslinked Sequence
FAAYWEXLAA

SEQ ID NO: 209 - protein, 14 aa, Artificial Sequence
  Description of Artificial Sequence: Synthetic peptide
  N-term Ac
  MOD_RES (1)..(1): Norleucine
  MOD_RES (5)..(5): Alpha-methyl R8-octenyl-alanine olefin amino acid connected by an all-carbon crosslinker that is fully saturated
  MOD_RES (12)..(12): Alpha-methyl S5-pentenyl-alanine olefin amino acid connected by an all-carbon crosslinker that is fully saturated
  C-term NH2
  Crosslinked Sequence
LPTFXNYWRLLAQN

SEQ ID NO: 210 - protein, 11 aa, Artificial Sequence
  Description of Artificial Sequence: Synthetic peptide
  N-term Ac
  MOD_RES (3)..(3): Alpha-Me R8-octenyl-alanine olefin amino acids connected by an all-carbon i to i+7 crosslinker comprising one double bond
  MOD_RES (10)..(10): Alpha-Me S5-pentenyl-alanine olefin amino acids connected by an all-carbon i to i+4 crosslinker comprising one double bond
  C-term NH2
  Crosslinked Sequence
TFAAAWRALAQ

SEQ ID NO: 211 - protein, 12 aa, Artificial Sequence
  Description of Artificial Sequence: Synthetic peptide
  N-term Ac
  MOD_RES (4)..(4): Alpha-methyl R8-octenyl-alanine olefin amino acid connected by an all-carbon crosslinker that is fully saturated
  MOD_RES (11)..(11): Alpha-methyl S5-pentenyl-alanine olefin amino acid connected by an all-carbon crosslinker that is fully saturated
  C-term NH2
  Crosslinked Sequence
TSFXHYWAQLAS

SEQ ID NO: 212 - protein, 10 aa, Artificial Sequence
  Description of Artificial Sequence: Synthetic peptide
  N-term Ac
  MOD_RES (2)..(2): Alpha-methyl R8-octenyl-alanine olefin amino acid connected by an all-carbon crosslinker that is fully saturated
  MOD_RES (5)..(5): 6cl-Trp
  MOD_RES (7)..(7): Aminocyclopropane carboxylic acid residue
  MOD_RES (9)..(9): Alpha-methyl S5-pentenyl-alanine olefin amino acid connected by an all-carbon crosslinker that is fully saturated
  C-term NH2
  Crosslinked Sequence
FAAYWEXLAA

SEQ ID NO: 213 - protein, 12 aa, Artificial Sequence
  Description of Artificial Sequence: Synthetic peptide
  N-term Ac
  MOD_RES (4)..(4): Alpha-Me R8-octenyl-alanine olefin amino acids connected by an all-carbon i to i+7 crosslinker comprising one double bond
  MOD_RES (11)..(11): Alpha-Me S5-pentenyl-alanine olefin amino acids connected by an all-carbon i to i+4 crosslinker comprising one double bond
  C-term NH2
  Crosslinked Sequence
LTFAHYWAQIAS

SEQ ID NO: 214 - protein, 12 aa, Artificial Sequence
  Description of Artificial Sequence: Synthetic peptide
  N-term Ac
  MOD_RES (4)..(4): Alpha-Me R8-octenyl-alanine olefin amino acids connected by an all-carbon i to i+7 crosslinker comprising one double bond
  MOD_RES (10)..(10): Norleucine
  MOD_RES (11)..(11): Alpha-Me S5-pentenyl-alanine olefin amino acids connected by an all-carbon i to i+4 crosslinker comprising one double bond
  C-term NH2
  Crosslinked Sequence
LTFAHYWAQLAS

SEQ ID NO: 215 - protein, 12 aa, Artificial Sequence
  Description of Artificial Sequence: Synthetic peptide
  N-term Ac
  MOD_RES (4)..(4): Alpha-Me R8-octenyl-alanine olefin amino acids connected by an all-carbon i to i+7 crosslinker comprising one double bond
  MOD_RES (11)..(11): Alpha-Me S5-pentenyl-alanine olefin amino acids connected by an all-carbon i to i+4 crosslinker comprising one double bond
  C-term NH2
  Crosslinked Sequence
LTFAHYWAQLAA

SEQ ID NO: 216 - protein, 12 aa, Artificial Sequence
  Description of Artificial Sequence: Synthetic peptide
  N-term Ac
  MOD_RES (4)..(4): Alpha-Me R8-octenyl-alanine olefin amino acids connected by an all-carbon i to i+7 crosslinker comprising one double bond
  MOD_RES (11)..(11): Alpha-Me S5-pentenyl-alanine olefin amino acids connected by an all-carbon i to i+4 crosslinker comprising one double bond
  MOD_RES (12)..(12): Abu
  C-term NH2
  Crosslinked Sequence
LTFAHYWAQLAX

SEQ ID NO: 217 - protein, 12 aa, Artificial Sequence
  Description of Artificial Sequence: Synthetic peptide
  N-term Ac
  MOD_RES (4)..(4): Alpha-Me R8-octenyl-alanine olefin amino acids connected by an all-carbon i to i+7 crosslinker comprising one double bond
  MOD_RES (8)..(8): Abu
  MOD_RES (11)..(11): Alpha-Me S5-pentenyl-alanine olefin amino acids connected by an all-carbon i to i+4 crosslinker comprising one double bond
  C-term NH2
  Crosslinked Sequence
LTFAHYWXQLAS

SEQ ID NO: 218 - protein, 12 aa, Artificial Sequence
  Description of Artificial Sequence: Synthetic peptide
  N-term Ac
  MOD_RES (4)..(4): Alpha-methyl R8-octenyl-alanine olefin amino acid connected by an all-carbon crosslinker comprising one double bond in trans configuration
  MOD_RES (11)..(11): Alpha-methyl S5-pentenyl-alanine olefin amino acid connected by an all-carbon crosslinker comprising one double bond in trans configuration
  C-term NH2
  Crosslinked Sequence
LTFAAYWAQLAS

SEQ ID NO: 219 - protein, 12 aa, Artificial Sequence
  Description of Artificial Sequence: Synthetic peptide
  N-term Ac
  MOD_RES (4)..(4): Alpha-Me R8-octenyl-alanine olefin amino acids connected by an all-carbon i to i+7 crosslinker comprising one double bond
  MOD_RES (11)..(11): Alpha-Me S5-pentenyl-alanine olefin amino acids connected by an all-carbon i to i+4 crosslinker comprising one double bond
  C-term NH2
  Crosslinked Sequence
LAFAHYWAQLAS

SEQ ID NO: 220 - protein, 12 aa, Artificial Sequence
  Description of Artificial Sequence: Synthetic peptide
  N-term Ac
  MOD_RES (4)..(4): Alpha-Me R8-octenyl-alanine olefin amino acids connected by an all-carbon i to i+7 crosslinker comprising one double bond
  MOD_RES (11)..(11): Alpha-Me S5-pentenyl-alanine olefin amino acids connected by an all-carbon i to i+4 crosslinker comprising one double bond
  C-term NH2
  Crosslinked Sequence
LAFAAYWAQLAS

SEQ ID NO: 221 - protein, 12 aa, Artificial Sequence
  Description of Artificial Sequence: Synthetic peptide
  N-term Ac
  MOD_RES (4)..(4): Alpha-methyl R8-octenyl-alanine olefin amino acid connected by an all-carbon crosslinker comprising one double bond in trans configuration
  MOD_RES (11)..(11): Alpha-methyl S5-pentenyl-alanine olefin amino acid connected by an all-carbon crosslinker comprising one double bond in trans configuration
  C-term NH2
  Crosslinked Sequence
LTFAAYWAQLAA

SEQ ID NO: 222 - protein, 12 aa, Artificial Sequence
  Description of Artificial Sequence: Synthetic peptide
  N-term Ac
  MOD_RES (4)..(4): Alpha-Me R8-octenyl-alanine olefin amino acids connected by an all-carbon i to i+7 crosslinker comprising one double bond
  MOD_RES (11)..(11): Alpha-Me S5-pentenyl-alanine olefin amino acids connected by an all-carbon i to i+4 crosslinker comprising one double bond
  C-term NH2
  Crosslinked Sequence
LAFAAYWAQLAA

SEQ ID NO: 223 - protein, 12 aa, Artificial Sequence
  Description of Artificial Sequence: Synthetic peptide
  N-term Ac
  MOD_RES (4)..(4): Alpha-Me R8-octenyl-alanine olefin amino acids connected by an all-carbon i to i+7 crosslinker comprising one double bond
  MOD_RES (9)..(9): Norleucine
  MOD_RES (11)..(11): Alpha-Me S5-pentenyl-alanine olefin amino acids connected by an all-carbon i to i+4 crosslinker comprising one double bond
  C-term NH2
  Crosslinked Sequence
LTFANLWALLAQ

SEQ ID NO: 224 - protein, 12 aa, Artificial Sequence
  Description of Artificial Sequence: Synthetic peptide
  N-term Ac
  MOD_RES (4)..(4): Alpha-Me R8-octenyl-alanine olefin amino acids connected by an all-carbon i to i+7 crosslinker comprising one double bond
  MOD_RES (9)..(9): Norleucine
  MOD_RES (11)..(11): Alpha-Me S5-pentenyl-alanine olefin amino acids connected by an all-carbon i to i+4 crosslinker comprising one double bond
  C-term NH2
  Crosslinked Sequence
LTFANLWALLAA

SEQ ID NO: 225 - protein, 12 aa, Artificial Sequence
  Description of Artificial Sequence: Synthetic peptide
  N-term Ac
  MOD_RES (4)..(4): Alpha-Me R8-octenyl-alanine olefin amino acids connected by an all-carbon i to i+7 crosslinker comprising one double bond
  MOD_RES (9)..(9): Norleucine
  MOD_RES (11)..(11): Alpha-Me S5-pentenyl-alanine olefin amino acids connected by an all-carbon i to i+4 crosslinker comprising one double bond
  C-term NH2
  Crosslinked Sequence
LTFAALWALLAQ

SEQ ID NO: 226 - protein, 12 aa, Artificial Sequence
  Description of Artificial Sequence: Synthetic peptide
  N-term Ac
  MOD_RES (4)..(4): Alpha-Me R8-octenyl-alanine olefin amino acids connected by an all-carbon i to i+7 crosslinker comprising one double bond
  MOD_RES (9)..(9): Norleucine
  MOD_RES (11)..(11): Alpha-Me S5-pentenyl-alanine olefin amino acids connected by an all-carbon i to i+4 crosslinker comprising one double bond
  C-term NH2
  Crosslinked Sequence
LAFANLWALLAQ

SEQ ID NO: 227 - protein, 12 aa, Artificial Sequence
  Description of Artificial Sequence: Synthetic peptide
  N-term Ac
  MOD_RES (4)..(4): Alpha-Me R8-octenyl-alanine olefin amino acids connected by an all-carbon i to i+7 crosslinker comprising one double bond
  MOD_RES (9)..(9): Norleucine
  MOD_RES (11)..(11): Alpha-Me S5-pentenyl-alanine olefin amino acids connected by an all-carbon i to i+4 crosslinker comprising one double bond
  C-term NH2
  Crosslinked Sequence
LAFAALWALLAA

SEQ ID NO: 228 - protein, 10 aa, Artificial Sequence
  Description of Artificial Sequence: Synthetic peptide
  N-term Ac
  MOD_RES (2)..(2): Alpha-Me R8-octenyl-alanine olefin amino acids connected by an all-carbon i to i+7 crosslinker comprising one double bond
  MOD_RES (7)..(7): Aminocyclopropane carboxylic acid residue
  MOD_RES (9)..(9): Alpha-Me S5-pentenyl-alanine olefin amino acids connected by an all-carbon i to i+4 crosslinker comprising one double bond
  C-term NH2
  Crosslinked Sequence
AAAYWEXLAA

SEQ ID NO: 229 - protein, 11 aa, Artificial Sequence
  Description of Artificial Sequence: Synthetic peptide
  N-term Ac
  MOD_RES (2)..(2): Alpha-Me R8-octenyl-alanine olefin amino acids connected by an all-carbon i to i+7 crosslinker comprising one double bond
  MOD_RES (7)..(7): Aminocyclopropane carboxylic acid residue
  MOD_RES (9)..(9): Alpha-Me S5-pentenyl-alanine olefin amino acids connected by an all-carbon i to i+4 crosslinker comprising one double bond
  C-term NH2
  Crosslinked Sequence
FAAYWEXLAAA

SEQ ID NO: 230 - protein, 10 aa, Artificial Sequence
  Description of Artificial Sequence: Synthetic peptide
  N-term Ac
  MOD_RES (2)..(2): Alpha-Me R8-octenyl-alanine olefin amino acids connected by an all-carbon i to i+7 crosslinker comprising one double bond
  MOD_RES (7)..(7): Aminocyclopropane carboxylic acid residue
  MOD_RES (9)..(9): Alpha-Me S5-pentenyl-alanine olefin amino acids connected by an all-carbon i to i+4 crosslinker comprising one double bond
  MOD_RES (10)..(10): Abu
  C-term NH2
  Crosslinked Sequence
FAAYWEXLAX

SEQ ID NO: 231 - protein, 10 aa, Artificial Sequence
  Description of Artificial Sequence: Synthetic peptide
  N-term Ac
  MOD_RES (2)..(2): Alpha-Me R8-octenyl-alanine olefin amino acids connected by an all-carbon i to i+7 crosslinker comprising one double bond
  MOD_RES (7)..(7): Aminocyclopropane carboxylic acid residue
  MOD_RES (9)..(9): Alpha-Me S5-pentenyl-alanine olefin amino acids connected by an all-carbon i to i+4 crosslinker comprising one double bond
  MOD_RES (10)..(10): Norleucine
  C-term NH2
  Crosslinked Sequence
FAAYWEXLAL

SEQ ID NO: 232 - protein, 10 aa, Artificial Sequence
  Description of Artificial Sequence: Synthetic peptide
  N-term Ac
  MOD_RES (2)..(2): Alpha-Me R5-pentenyl-alanine olefin amino acids connected by an all-carbon i to i+4 crosslinker comprising one double bond
  MOD_RES (7)..(7): Aminocyclopropane carboxylic acid residue
  MOD_RES (9)..(9): Alpha-Me S8-octenyl-alanine olefin amino acids connected by an all-carbon i to i+7 crosslinker comprising one double bond
  C-term NH2
  Crosslinked Sequence
FAAYWEXLAA

SEQ ID NO: 233 - protein, 10 aa, Artificial Sequence
  Description of Artificial Sequence: Synthetic peptide
  N-term Ac
  MOD_RES (2)..(2): Alpha-Me S5-pentenyl-alanine olefin amino acids connected by an all-carbon i to i+4 crosslinker comprising one double bond
  MOD_RES (7)..(7): Aminocyclopropane carboxylic acid residue
  MOD_RES (9)..(9): Alpha-Me R8-octenyl-alanine olefin amino acids connected by an all-carbon i to i+7 crosslinker comprising one double bond
  C-term NH2
  Crosslinked Sequence
FAAYWEXLAA

SEQ ID NO: 234 - protein, 10 aa, Artificial Sequence
  Description of Artificial Sequence: Synthetic peptide
  N-term Ac
  MOD_RES (2)..(2): Alpha-Me R8-octenyl-alanine olefin amino acids connected by an all-carbon i to i+7 crosslinker comprising one double bond
  MOD_RES (7)..(7): Aminocyclopropane carboxylic acid residue
  MOD_RES (9)..(9): Alpha-Me S5-pentenyl-alanine olefin amino acids connected by an all-carbon i to i+4 crosslinker comprising one double bond
  C-term NH2
  Crosslinked Sequence
FAAYWEXIAA

SEQ ID NO: 235 - protein, 10 aa, Artificial Sequence
  Description of Artificial Sequence: Synthetic peptide
  N-term Ac
  MOD_RES (2)..(2): Alpha-Me R8-octenyl-alanine olefin amino acids connected by an all-carbon i to i+7 crosslinker comprising one double bond
  MOD_RES (7)..(7): Aminocyclopropane carboxylic acid residue
  MOD_RES (8)..(8): Norleucine
  MOD_RES (9)..(9): Alpha-Me S5-pentenyl-alanine olefin amino acids connected by an all-carbon i to i+4 crosslinker comprising one double bond
  C-term NH2
  Crosslinked Sequence
FAAYWEXLAA

SEQ ID NO: 236 - protein, 10 aa, Artificial Sequence
  Description of Artificial Sequence: Synthetic peptide
  N-term Ac
  MOD_RES (2)..(2): Alpha-Me R8-octenyl-alanine olefin amino acids connected by an all-carbon i to i+7 crosslinker comprising one double bond
  MOD_RES (7)..(7): Alpha-Me-Leu
  MOD_RES (9)..(9): Alpha-Me S5-pentenyl-alanine olefin amino acids connected by an all-carbon i to i+4 crosslinker comprising one double bond
  C-term NH2
  Crosslinked Sequence
FAAYWELLAA

SEQ ID NO: 237 - protein, 10 aa, Artificial Sequence
  Description of Artificial Sequence: Synthetic peptide
  N-term Ac
  MOD_RES (2)..(2): Alpha-Me R8-octenyl-alanine olefin amino acids connected by an all-carbon i to i+7 crosslinker comprising one double bond
  MOD_RES (7)..(7): Norleucine
  MOD_RES (9)..(9): Alpha-Me S5-pentenyl-alanine olefin amino acids connected by an all-carbon i to i+4 crosslinker comprising one double bond
  C-term NH2
  Crosslinked Sequence
FAAYWELLAA

SEQ ID NO: 238 - protein, 10 aa, Artificial Sequence
  Description of Artificial Sequence: Synthetic peptide
  N-term Ac
  MOD_RES (2)..(2): Alpha-Me R8-octenyl-alanine olefin amino acids connected by an all-carbon i to i+7 crosslinker comprising one double bond
  MOD_RES (7)..(7): Aminocyclopropane carboxylic acid residue
  MOD_RES (9)..(9): Alpha-Me S5-pentenyl-alanine olefin amino acids connected by an all-carbon i to i+4 crosslinker comprising one double bond
  C-term NH2
  Crosslinked Sequence
FAAYWQXLAA

SEQ ID NO: 239 - protein, 10 aa, Artificial Sequence
  Description of Artificial Sequence: Synthetic peptide
  N-term Ac
  MOD_RES (2)..(2): Alpha-Me R8-octenyl-alanine olefin amino acids connected by an all-carbon i to i+7 crosslinker comprising one double bond
  MOD_RES (7)..(7): Aminocyclopropane carboxylic acid residue
  MOD_RES (9)..(9): Alpha-Me S5-pentenyl-alanine olefin amino acids connected by an all-carbon i to i+4 crosslinker comprising one double bond
  C-term NH2
  Crosslinked Sequence
FAAYWAXLAA

SEQ ID NO: 240 - protein, 10 aa, Artificial Sequence
  Description of Artificial Sequence: Synthetic peptide
  N-term Ac
  MOD_RES (2)..(2): Alpha-Me R8-octenyl-alanine olefin amino acids connected by an all-carbon i to i+7 crosslinker comprising one double bond
  MOD_RES (6)..(6): Abu
  MOD_RES (7)..(7): Aminocyclopropane carboxylic acid residue
  MOD_RES (9)..(9): Alpha-Me S5-pentenyl-alanine olefin amino acids connected by an all-carbon i to i+4 crosslinker comprising one double bond
  C-term NH2
  Crosslinked Sequence
FAAYWXXLAA

SEQ ID NO: 241 - protein, 10 aa, Artificial Sequence
  Description of Artificial Sequence: Synthetic peptide
  N-term Ac
  MOD_RES (2)..(2): Alpha-Me R8-octenyl-alanine olefin amino acids connected by an all-carbon i to i+7 crosslinker comprising one double bond
  MOD_RES (6)..(6): Norleucine
  MOD_RES (7)..(7): Aminocyclopropane carboxylic acid residue
  MOD_RES (9)..(9): Alpha-Me S5-pentenyl-alanine olefin amino acids connected by an all-carbon i to i+4 crosslinker comprising one double bond
  C-term NH2
  Crosslinked Sequence
FAAYWLXLAA

SEQ ID NO: 242 - protein, 10 aa, Artificial Sequence
  Description of Artificial Sequence: Synthetic peptide
  N-term Ac
  MOD_RES (2)..(2): Alpha-Me R8-octenyl-alanine olefin amino acids connected by an all-carbon i to i+7 crosslinker comprising one double bond
  MOD_RES (3)..(3): Abu
  MOD_RES (7)..(7): Aminocyclopropane carboxylic acid residue
  MOD_RES (9)..(9): Alpha-Me S5-pentenyl-alanine olefin amino acids connected by an all-carbon i to i+4 crosslinker comprising one double bond
  C-term NH2
  Crosslinked Sequence
FAXYWEXLAA

SEQ ID NO: 243 - protein, 10 aa, Artificial Sequence
  Description of Artificial Sequence: Synthetic peptide
  N-term Ac
  MOD_RES (2)..(2): Alpha-Me R8-octenyl-alanine olefin amino acids connected by an all-carbon i to i+7 crosslinker comprising one double bond
  MOD_RES (3)..(3): Norleucine
  MOD_RES (7)..(7): Aminocyclopropane carboxylic acid residue
  MOD_RES (9)..(9): Alpha-Me S5-pentenyl-alanine olefin amino acids connected by an all-carbon i to i+4 crosslinker comprising one double bond
  C-term NH2
  Crosslinked Sequence
FALYWEXLAA

SEQ ID NO: 244 - protein, 13 aa, Artificial Sequence
  Description of Artificial Sequence: Synthetic peptide
  N-term 5-FAM
  MOD_RES (1)..(1): Beta-Ala
  C-term NH2
  Crosslinked Sequence
ALTFEHYWAQLTS

SEQ ID NO: 245 - protein, 13 aa, Artificial Sequence
  Description of Artificial Sequence: Synthetic peptide
  N-term 5-FAM
  MOD_RES (1)..(1): Beta-Ala
  MOD_RES (5)..(5): Alpha-methyl R8-octenyl-alanine olefin amino acid connected by an all-carbon crosslinker that is fully saturated
  MOD_RES (12)..(12): Alpha-methyl S5-pentenyl-alanine olefin amino acid connected by an all-carbon crosslinker that is fully saturated
  C-term NH2
  Crosslinked Sequence
ALTFAHYWAQLAS

SEQ ID NO: 246 - protein, 12 aa, Artificial Sequence
  Description of Artificial Sequence: Synthetic peptide
  N-term Ac
  MOD_RES (4)..(4): Alpha-Me R8-octenyl-alanine olefin amino acids connected by an all-carbon i to i+7 crosslinker comprising one double bond
  MOD_RES (10)..(10): Homo-Leu
  MOD_RES (11)..(11): Alpha-Me S5-pentenyl-alanine olefin amino acids connected by an all-carbon i to i+4 crosslinker comprising one double bond
  C-term NH2
  Crosslinked Sequence
LTFAHYWAQLAS

SEQ ID NO: 247 - protein, 12 aa, Artificial Sequence
  Description of Artificial Sequence: Synthetic peptide
  N-term Ac
  MOD_RES (4)..(4): Alpha-Me R8-octenyl-alanine olefin amino acids connected by an all-carbon i to i+7 crosslinker comprising one double bond
  MOD_RES (10)..(10): Tert-butyl-Gly
  MOD_RES (11)..(11): Alpha-Me S5-pentenyl-alanine olefin amino acids connected by an all-carbon i to i+4 crosslinker comprising one double bond
  C-term NH2
  Crosslinked Sequence
LTFAHYWAQGAS

SEQ ID NO: 248 - protein, 12 aa, Artificial Sequence
  Description of Artificial Sequence: Synthetic peptide
  N-term Ac
  MOD_RES (4)..(4): Alpha-Me R8-octenyl-alanine olefin amino acids connected by an all-carbon i to i+7 crosslinker comprising one double bond
  MOD_RES (10)..(10): Adamantyl-Gly
  MOD_RES (11)..(11): Alpha-Me S5-pentenyl-alanine olefin amino acids connected by an all-carbon i to i+4 crosslinker comprising one double bond
  C-term NH2
  Crosslinked Sequence
LTFAHYWAQGAS

SEQ ID NO: 249 - protein, 12 aa, Artificial Sequence
  Description of Artificial Sequence: Synthetic peptide
  N-term Ac
  MOD_RES (4)..(4): Alpha-Me R8-octenyl-alanine olefin amino acids connected by an all-carbon i to i+7 crosslinker comprising one double bond
  MOD_RES (10)..(10): Homo-Cyclohexylalanine
  MOD_RES (11)..(11): Alpha-Me S5-pentenyl-alanine olefin amino acids connected by an all-carbon i to i+4 crosslinker comprising one double bond
  C-term NH2
  Crosslinked Sequence
LTFAHYWAQAAS

SEQ ID NO: 250 - protein, 12 aa, Artificial Sequence
  Description of Artificial Sequence: Synthetic peptide
  N-term Ac
  MOD_RES (4)..(4): Alpha-Me R8-octenyl-alanine olefin amino acids connected by an all-carbon i to i+7 crosslinker comprising one double bond
  MOD_RES (10)..(10): Cyclohexylalanine
  MOD_RES (11)..(11): Alpha-Me S5-pentenyl-alanine olefin amino acids connected by an all-carbon i to i+4 crosslinker comprising one double bond
  C-term NH2
  Crosslinked Sequence
LTFAHYWAQAAS

SEQ ID NO: 251 - protein, 12 aa, Artificial Sequence
  Description of Artificial Sequence: Synthetic peptide
  N-term Ac
  MOD_RES (4)..(4): Alpha-Me R8-octenyl-alanine olefin amino acids connected by an all-carbon i to i+7 crosslinker comprising one double bond
  MOD_RES (8)..(8): Aminocyclohexane carboxylic acid residue
  MOD_RES (11)..(11): Alpha-Me S5-pentenyl-alanine olefin amino acids connected by an all-carbon i to i+4 crosslinker comprising one double bond
  C-term NH2
  Crosslinked Sequence
LTFAHYWXQLAS

SEQ ID NO: 252 - protein, 12 aa, Artificial Sequence
  Description of Artificial Sequence: Synthetic peptide
  N-term Ac
  MOD_RES (4)..(4): Alpha-Me R8-octenyl-alanine olefin amino acids connected by an all-carbon i to i+7 crosslinker comprising one double bond
  MOD_RES (8)..(8): Aminocyclopentane carboxylic acid residue
  MOD_RES (11)..(11): Alpha-Me S5-pentenyl-alanine olefin amino acids connected by an all-carbon i to i+4 crosslinker comprising one double bond
  C-term NH2
  Crosslinked Sequence
LTFAHYWXQLAS

SEQ ID NO: 253 - protein, 12 aa, Artificial Sequence
  Description of Artificial Sequence: Synthetic peptide
  N-term Ac
  MOD_RES (3)..(3): Homo-Phe
  MOD_RES (4)..(4): Alpha-Me R8-octenyl-alanine olefin amino acids connected by an all-carbon i to i+7 crosslinker comprising one double bond
  MOD_RES (11)..(11): Alpha-Me S5-pentenyl-alanine olefin amino acids connected by an all-carbon i to i+4 crosslinker comprising one double bond
  C-term NH2
  Crosslinked Sequence
LTFAHYWAQLAS

SEQ ID NO: 254 - protein, 12 aa, Artificial Sequence
  Description of Artificial Sequence: Synthetic peptide
  N-term Ac
  MOD_RES (3)..(3): Indanyl-Gly
  MOD_RES (4)..(4): Alpha-Me R8-octenyl-alanine olefin amino acids connected by an all-carbon i to i+7 crosslinker comprising one double bond
  MOD_RES (11)..(11): Alpha-Me S5-pentenyl-alanine olefin amino acids connected by an all-carbon i to i+4 crosslinker comprising one double bond
  C-term NH2
  Crosslinked Sequence
LTGAHYWAQLAS

SEQ ID NO: 255 - protein, 12 aa, Artificial Sequence
  Description of Artificial Sequence: Synthetic peptide
  N-term Ac
  MOD_RES (4)..(4): Alpha-Me R8-octenyl-alanine olefin amino acids connected by an all-carbon i to i+7 crosslinker comprising one double bond
  MOD_RES (10)..(10): Cyclohexylglycine
  MOD_RES (11)..(11): Alpha-Me S5-pentenyl-alanine olefin amino acids connected by an all-carbon i to i+4 crosslinker comprising one double bond
  C-term NH2
  Crosslinked Sequence
LTFAHYWAQGAS

SEQ ID NO: 256 - protein, 12 aa, Artificial Sequence
  Description of Artificial Sequence: Synthetic peptide
  N-term Ac
  MOD_RES (4)..(4): Alpha-Me R8-octenyl-alanine olefin amino acids connected by an all-carbon i to i+7 crosslinker comprising one double bond
  MOD_RES (11)..(11): Alpha-Me S5-pentenyl-alanine olefin amino acids connected by an all-carbon i to i+4 crosslinker comprising one double bond
  C-term NH2
  Crosslinked Sequence
LTFAHYWAQFAS

SEQ ID NO: 257 - protein, 12 aa, Artificial Sequence
  Description of Artificial Sequence: Synthetic peptide
  N-term Ac
  MOD_RES (4)..(4): Alpha-Me R8-octenyl-alanine olefin amino acids connected by an all-carbon i to i+7 crosslinker comprising one double bond
  MOD_RES (10)..(10): Indanyl-Gly
  MOD_RES (11)..(11): Alpha-Me S5-pentenyl-alanine olefin amino acids connected by an all-carbon i to i+4 crosslinker comprising one double bond
  C-term NH2
  Crosslinked Sequence
LTFAHYWAQGAS

SEQ ID NO: 258 - protein, 12 aa, Artificial Sequence
  Description of Artificial Sequence: Synthetic peptide
  N-term Ac
  MOD_RES (4)..(4): Alpha-Me R8-octenyl-alanine olefin amino acids connected by an all-carbon i to i+7 crosslinker comprising one double bond
  MOD_RES (10)..(10): Cyclobutyl-Ala
  MOD_RES (11)..(11): Alpha-Me S5-pentenyl-alanine olefin amino acids connected by an all-carbon i to i+4 crosslinker comprising one double bond
  C-term NH2
  Crosslinked Sequence
LTFAHYWAQAAS

SEQ ID NO: 259 - protein, 12 aa, Artificial Sequence
  Description of Artificial Sequence: Synthetic peptide
  N-term Ac
  MOD_RES (4)..(4): Alpha-Me R8-octenyl-alanine olefin amino acids connected by an all-carbon i to i+7 crosslinker comprising one double bond
  MOD_RES (10)..(10): Cyclopentylglycine
  MOD_RES (11)..(11): Alpha-Me S5-pentenyl-alanine olefin amino acids connected by an all-carbon i to i+4 crosslinker comprising one double bond
  C-term NH2
  Crosslinked Sequence
LTFAHYWAQGAS

SEQ ID NO: 260 - protein, 12 aa, Artificial Sequence
  Description of Artificial Sequence: Synthetic peptide
  N-term Ac
  MOD_RES (4)..(4): Alpha-Me R8-octenyl-alanine olefin amino acids connected by an all-carbon i to i+7 crosslinker comprising one double bond
  MOD_RES (6)..(6): Homo-Tyr
  MOD_RES (11)..(11): Alpha-Me S5-pentenyl-alanine olefin amino acids connected by an all-carbon i to i+4 crosslinker comprising one double bond
  C-term NH2
  Crosslinked Sequence
LTFAHYWAQLAS

SEQ ID NO: 261 - protein, 10 aa, Artificial Sequence
  Description of Artificial Sequence: Synthetic peptide
  N-term Ac
  MOD_RES (2)..(2): Alpha-Me R8-octenyl-alanine olefin amino acids connected by an all-carbon i to i+7 crosslinker comprising one double bond
  MOD_RES (7)..(7): Aminocyclopropane carboxylic acid residue
  MOD_RES (8)..(8): Homo-Leu
  MOD_RES (9)..(9): Alpha-Me S5-pentenyl-alanine olefin amino acids connected by an all-carbon i to i+4 crosslinker comprising one double bond
  C-term NH2
  Crosslinked Sequence
FAAYWEXLAA

SEQ ID NO: 262 - protein, 10 aa, Artificial Sequence
  Description of Artificial Sequence: Synthetic peptide
  N-term Ac
  MOD_RES (2)..(2): Alpha-Me R8-octenyl-alanine olefin amino acids connected by an all-carbon i to i+7 crosslinker comprising one double bond
  MOD_RES (7)..(7): Aminocyclopropane carboxylic acid residue
  MOD_RES (8)..(8): Tert-butyl-Gly
  MOD_RES (9)..(9): Alpha-Me S5-pentenyl-alanine olefin amino acids connected by an all-carbon i to i+4 crosslinker comprising one double bond
  C-term NH2
  Crosslinked Sequence
FAAYWEXGAA

SEQ ID NO: 263 - protein, 10 aa, Artificial Sequence
  Description of Artificial Sequence: Synthetic peptide
  N-term Ac
  MOD_RES (2)..(2): Alpha-Me R8-octenyl-alanine olefin amino acids connected by an all-carbon i to i+7 crosslinker comprising one double bond
  MOD_RES (7)..(7): Aminocyclopropane carboxylic acid residue
  MOD_RES (8)..(8): Adamantyl-Gly
  MOD_RES (9)..(9): Alpha-Me S5-pentenyl-alanine olefin amino acids connected by an all-carbon i to i+4 crosslinker comprising one double bond
  C-term NH2
  Crosslinked Sequence
FAAYWEXGAA

SEQ ID NO: 264 - protein, 10 aa, Artificial Sequence
  Description of Artificial Sequence: Synthetic peptide
  N-term Ac
  MOD_RES (2)..(2): Alpha-Me R8-octenyl-alanine olefin amino acids connected by an all-carbon i to i+7 crosslinker comprising one double bond
  MOD_RES (7)..(7): Aminocyclopropane carboxylic acid residue
  MOD_RES (8)..(8): Homo-Cyclohexylalanine
  MOD_RES (9)..(9): Alpha-Me S5-pentenyl-alanine olefin amino acids connected by an all-carbon i to i+4 crosslinker comprising one double bond
  C-term NH2
  Crosslinked Sequence
FAAYWEXAAA

SEQ ID NO: 265 - protein, 10 aa, Artificial Sequence
  Description of Artificial Sequence: Synthetic peptide
  N-term Ac
  MOD_RES (2)..(2): Alpha-Me R8-octenyl-alanine olefin amino acids connected by an all-carbon i to i+7 crosslinker comprising one double bond
  MOD_RES (7)..(7): Aminocyclopropane carboxylic acid residue
  MOD_RES (8)..(8): Cyclohexylalanine
  MOD_RES (9)..(9): Alpha-Me S5-pentenyl-alanine olefin amino acids connected by an all-carbon i to i+4 crosslinker comprising one double bond
  C-term NH2
  Crosslinked Sequence
FAAYWEXAAA

SEQ ID NO: 266 - protein, 10 aa, Artificial Sequence
  Description of Artificial Sequence: Synthetic peptide
  N-term Ac
  MOD_RES (2)..(2): Alpha-Me R8-octenyl-alanine olefin amino acids connected by an all-carbon i to i+7 crosslinker comprising one double bond
  MOD_RES (7)..(7): Aminocyclohexane carboxylic acid residue
  MOD_RES (9)..(9): Alpha-Me S5-pentenyl-alanine olefin amino acids connected by an all-carbon i to i+4 crosslinker comprising one double bond
  C-term NH2
  Crosslinked Sequence
FAAYWEXLAA

SEQ ID NO: 267 - protein, 10 aa, Artificial Sequence
  Description of Artificial Sequence: Synthetic peptide
  N-term Ac
  MOD_RES (2)..(2): Alpha-Me R8-octenyl-alanine olefin amino acids connected by an all-carbon i to i+7 crosslinker comprising one double bond
  MOD_RES (7)..(7): Aminocyclopentane carboxylic acid residue
  MOD_RES (9)..(9): Alpha-Me S5-pentenyl-alanine olefin amino acids connected by an all-carbon i to i+4 crosslinker comprising one double bond
  C-term NH2
  Crosslinked Sequence
FAAYWEXLAA

SEQ ID NO: 268 - protein, 10 aa, Artificial Sequence
  Description of Artificial Sequence: Synthetic peptide
  N-term Ac
  MOD_RES (1)..(1): Homo-Phe
  MOD_RES (2)..(2): Alpha-Me R8-octenyl-alanine olefin amino acids connected by an all-carbon i to i+7 crosslinker comprising one double bond
  MOD_RES (7)..(7): Aminocyclopropane carboxylic acid residue
  MOD_RES (9)..(9): Alpha-Me S5-pentenyl-alanine olefin amino acids connected by an all-carbon i to i+4 crosslinker comprising one double bond
  C-term NH2
  Crosslinked Sequence
FAAYWEXLAA

SEQ ID NO: 269 - protein, 10 aa, Artificial Sequence
  Description of Artificial Sequence: Synthetic peptide
  N-term Ac
  MOD_RES (1)..(1): Indanyl-Gly
  MOD_RES (2)..(2): Alpha-Me R8-octenyl-alanine olefin amino acids connected by an all-carbon i to i+7 crosslinker comprising one double bond
  MOD_RES (7)..(7): Aminocyclopropane carboxylic acid residue
  MOD_RES (9)..(9): Alpha-Me S5-pentenyl-alanine olefin amino acids connected by an all-carbon i to i+4 crosslinker comprising one double bond
  C-term NH2
  Crosslinked Sequence
GAAYWEXLAA

SEQ ID NO: 270 - protein, 10 aa, Artificial Sequence
  Description of Artificial Sequence: Synthetic peptide
  N-term Ac
  MOD_RES (2)..(2): Alpha-Me R8-octenyl-alanine olefin amino acids connected by an all-carbon i to i+7 crosslinker comprising one double bond
  MOD_RES (7)..(7): Aminocyclopropane carboxylic acid residue
  MOD_RES (9)..(9): Alpha-Me S5-pentenyl-alanine olefin amino acids connected by an all-carbon i to i+4 crosslinker comprising one double bond
  C-term NH2
  Crosslinked Sequence
FAAYWEXFAA

SEQ ID NO: 271 - protein, 10 aa, Artificial Sequence
  Description of Artificial Sequence: Synthetic peptide
  N-term Ac
  MOD_RES (2)..(2): Alpha-Me R8-octenyl-alanine olefin amino acids connected by an all-carbon i to i+7 crosslinker comprising one double bond
  MOD_RES (7)..(7): Aminocyclopropane carboxylic acid residue
  MOD_RES (8)..(8): Indanyl-Gly
  MOD_RES (9)..(9): Alpha-Me S5-pentenyl-alanine olefin amino acids connected by an all-carbon i to i+4 crosslinker comprising one double bond
  C-term NH2
  Crosslinked Sequence
FAAYWEXGAA

SEQ ID NO: 272 - protein, 10 aa, Artificial Sequence
  Description of Artificial Sequence: Synthetic peptide
  N-term Ac
  MOD_RES (2)..(2): Alpha-Me R8-octenyl-alanine olefin amino acids connected by an all-carbon i to i+7 crosslinker comprising one double bond
  MOD_RES (7)..(7): Aminocyclopropane carboxylic acid residue
  MOD_RES (8)..(8): Cyclobutyl-Ala
  MOD_RES (9)..(9): Alpha-Me S5-pentenyl-alanine olefin amino acids connected by an all-carbon i to i+4 crosslinker comprising one double bond
  C-term NH2
  Crosslinked Sequence
FAAYWEXAAA

SEQ ID NO: 273 - protein, 10 aa, Artificial Sequence
  Description of Artificial Sequence: Synthetic peptide
  N-term Ac
  MOD_RES (2)..(2): Alpha-Me R8-octenyl-alanine olefin amino acids connected by an all-carbon i to i+7 crosslinker comprising one double bond
  MOD_RES (7)..(7): Aminocyclopropane carboxylic acid residue
  MOD_RES (8)..(8): Cyclopentylglycine
  MOD_RES (9)..(9): Alpha-Me S5-pentenyl-alanine olefin amino acids connected by an all-carbon i to i+4 crosslinker comprising one double bond
  C-term NH2
  Crosslinked Sequence
FAAYWEXGAA

SEQ ID NO: 274 - protein, 10 aa, Artificial Sequence
  Description of Artificial Sequence: Synthetic peptide
  N-term Ac
  MOD_RES (2)..(2): Alpha-Me R8-octenyl-alanine olefin amino acids connected by an all-carbon i to i+7 crosslinker comprising one double bond
  MOD_RES (4)..(4): Homo-Tyr
  MOD_RES (7)..(7): Aminocyclopropane carboxylic acid residue
  MOD_RES (9)..(9): Alpha-Me S5-pentenyl-alanine olefin amino acids connected by an all-carbon i to i+4 crosslinker comprising one double bond
  C-term NH2
  Crosslinked Sequence
FAAYWEXLAA

SEQ ID NO: 275 - protein, 10 aa, Artificial Sequence
  Description of Artificial Sequence: Synthetic peptide
  N-term Ac
  MOD_RES (2)..(2): Alpha-Me R8-octenyl-alanine olefin amino acids connected by an all-carbon i to i+7 crosslinker comprising one double bond
  MOD_RES (7)..(7): Aminocyclopropane carboxylic acid residue
  MOD_RES (9)..(9): Alpha-Me S5-pentenyl-alanine olefin amino acids connected by an all-carbon i to i+4 crosslinker comprising one double bond
  C-term NH2
  Crosslinked Sequence
FAAYWEXLAQ

SEQ ID NO: 276 - protein, 10 aa, Artificial Sequence
  Description of Artificial Sequence: Synthetic peptide
  N-term Ac
  MOD_RES (2)..(2): Alpha-Me R8-octenyl-alanine olefin amino acids connected by an all-carbon i to i+7 crosslinker comprising one double bond
  MOD_RES (7)..(7): 2-aminoisobutyric acid
  MOD_RES (9)..(9): Alpha-Me S5-pentenyl-alanine olefin amino acids connected by an all-carbon i to i+4 crosslinker comprising one double bond
  C-term NH2
  Crosslinked Sequence
FAAYWEXLAA

SEQ ID NO: 277 - protein, 10 aa, Artificial Sequence
  Description of Artificial Sequence: Synthetic peptide
  N-term Ac
  MOD_RES (2)..(2): Alpha-Me R8-octenyl-alanine olefin amino acids connected by an all-carbon i to i+7 crosslinker comprising one double bond
  MOD_RES (9)..(9): Alpha-Me S5-pentenyl-alanine olefin amino acids connected by an all-carbon i to i+4 crosslinker comprising one double bond
  C-term NH2
  Crosslinked Sequence
FAAYWEALAA

SEQ ID NO: 278 - protein, 12 aa, Artificial Sequence
  Description of Artificial Sequence: Synthetic peptide
  N-term Ac
  MOD_RES (4)..(4): Alpha-Me R8-octenyl-alanine olefin amino acids connected by an all-carbon i to i+7 crosslinker comprising one double bond
  MOD_RES (11)..(11): Alpha-Me S5-pentenyl-alanine olefin amino acids connected by an all-carbon i to i+4 crosslinker comprising one double bond
  C-term NH2
  Crosslinked Sequence
LAFAAYWAALAA

SEQ ID NO: 279 - protein, 12 aa, Artificial Sequence
  Description of Artificial Sequence: Synthetic peptide
  N-term Ac
  MOD_RES (4)..(4): Alpha-Me R8-octenyl-alanine olefin amino acids connected by an all-carbon i to i+7 crosslinker comprising one double bond
  MOD_RES (9)..(9): Aminocyclopropane carboxylic acid residue
  MOD_RES (11)..(11): Alpha-Me S5-pentenyl-alanine olefin amino acids connected by an all-carbon i to i+4 crosslinker comprising one double bond
  C-term NH2
  Crosslinked Sequence
LTFAHYWAXLAS

SEQ ID NO: 280 - protein, 12 aa, Artificial Sequence
  Description of Artificial Sequence: Synthetic peptide
  N-term Ac
  MOD_RES (1)..(1): Norleucine
  MOD_RES (4)..(4): Alpha-Me R8-octenyl-alanine olefin amino acids connected by an all-carbon i to i+7 crosslinker comprising one double bond
  MOD_RES (11)..(11): Alpha-Me S5-pentenyl-alanine olefin amino acids connected by an all-carbon i to i+4 crosslinker comprising one double bond
  C-term NH2
  Crosslinked Sequence
LTFAHYWAQLAS

SEQ ID NO: 281 - protein, 12 aa, Artificial Sequence
  Description of Artificial Sequence: Synthetic peptide
  N-term Ac
  MOD_RES (4)..(4): Alpha-Me R8-octenyl-alanine olefin amino acids connected by an all-carbon i to i+7 crosslinker comprising one double bond
  MOD_RES (11)..(11): Alpha-Me S5-pentenyl-alanine olefin amino acids connected by an all-carbon i to i+4 crosslinker comprising one double bond
  C-term NH2
  Crosslinked Sequence
VTFAHYWAQLAS

SEQ ID NO: 282 - protein, 12 aa, Artificial Sequence
  Description of Artificial Sequence: Synthetic peptide
  N-term Ac
  MOD_RES (4)..(4): Alpha-Me R8-octenyl-alanine olefin amino acids connected by an all-carbon i to i+7 crosslinker comprising one double bond
  MOD_RES (11)..(11): Alpha-Me S5-pentenyl-alanine olefin amino acids connected by an all-carbon i to i+4 crosslinker comprising one double bond
  C-term NH2
  Crosslinked Sequence
FTFAHYWAQLAS

SEQ ID NO: 283 - protein, 12 aa, Artificial Sequence
  Description of Artificial Sequence: Synthetic peptide
  N-term Ac
  MOD_RES (4)..(4): Alpha-Me R8-octenyl-alanine olefin amino acids connected by an all-carbon i to i+7 crosslinker comprising one double bond
  MOD_RES (11)..(11): Alpha-Me S5-pentenyl-alanine olefin amino acids connected by an all-carbon i to i+4 crosslinker comprising one double bond
  C-term NH2
  Crosslinked Sequence
WTFAHYWAQLAS

SEQ ID NO: 284 - protein, 12 aa, Artificial Sequence
  Description of Artificial Sequence: Synthetic peptide
  N-term Ac
  MOD_RES (4)..(4): Alpha-Me R8-octenyl-alanine olefin amino acids connected by an all-carbon i to i+7 crosslinker comprising one double bond
  MOD_RES (11)..(11): Alpha-Me S5-pentenyl-alanine olefin amino acids connected by an all-carbon i to i+4 crosslinker comprising one double bond
  C-term NH2
  Crosslinked Sequence
RTFAHYWAQLAS

SEQ ID NO: 285 - protein, 12 aa, Artificial Sequence
  Description of Artificial Sequence: Synthetic peptide
  N-term Ac
  MOD_RES (4)..(4): Alpha-Me R8-octenyl-alanine olefin amino acids connected by an all-carbon i to i+7 crosslinker comprising one double bond
  MOD_RES (11)..(11): Alpha-Me S5-pentenyl-alanine olefin amino acids connected by an all-carbon i to i+4 crosslinker comprising one double bond
  C-term NH2
  Crosslinked Sequence
KTFAHYWAQLAS

SEQ ID NO: 286 - protein, 12 aa, Artificial Sequence
  Description of Artificial Sequence: Synthetic peptide
  N-term Ac
  MOD_RES (2)..(2): Norleucine
  MOD_RES (4)..(4): Alpha-Me R8-octenyl-alanine olefin amino acids connected by an all-carbon i to i+7 crosslinker comprising one double bond
  MOD_RES (11)..(11): Alpha-Me S5-pentenyl-alanine olefin amino acids connected by an all-carbon i to i+4 crosslinker comprising one double bond
  C-term NH2
  Crosslinked Sequence
LLFAHYWAQLAS

SEQ ID NO: 287 - protein, 12 aa, Artificial Sequence
  Description of Artificial Sequence: Synthetic peptide
  N-term Ac
  MOD_RES (4)..(4): Alpha-Me R8-octenyl-alanine olefin amino acids connected by an all-carbon i to i+7 crosslinker comprising one double bond
  MOD_RES (11)..(11): Alpha-Me S5-pentenyl-alanine olefin amino acids connected by an all-carbon i to i+4 crosslinker comprising one double bond
  C-term NH2
  Crosslinked Sequence
LVFAHYWAQLAS

SEQ ID NO: 288 - protein, 12 aa, Artificial Sequence
  Description of Artificial Sequence: Synthetic peptide
  N-term Ac
  MOD_RES (4)..(4): Alpha-Me R8-octenyl-alanine olefin amino acids connected by an all-carbon i to i+7 crosslinker comprising one double bond
  MOD_RES (11)..(11): Alpha-Me S5-pentenyl-alanine olefin amino acids connected by an all-carbon i to i+4 crosslinker comprising one double bond
  C-term NH2
  Crosslinked Sequence
LFFAHYWAQLAS

SEQ ID NO: 289 - protein, 12 aa, Artificial Sequence
  Description of Artificial Sequence: Synthetic peptide
  N-term Ac
  MOD_RES (4)..(4): Alpha-Me R8-octenyl-alanine olefin amino acids connected by an all-carbon i to i+7 crosslinker comprising one double bond
  MOD_RES (11)..(11): Alpha-Me S5-pentenyl-alanine olefin amino acids connected by an all-carbon i to i+4 crosslinker comprising one double bond
  C-term NH2
  Crosslinked Sequence
LWFAHYWAQLAS

SEQ ID NO: 290 - protein, 12 aa, Artificial Sequence
  Description of Artificial Sequence: Synthetic peptide
  N-term Ac
  MOD_RES (4)..(4): Alpha-Me R8-octenyl-alanine olefin amino acids connected by an all-carbon i to i+7 crosslinker comprising one double bond
  MOD_RES (11)..(11): Alpha-Me S5-pentenyl-alanine olefin amino acids connected by an all-carbon i to i+4 crosslinker comprising one double bond
  C-term NH2
  Crosslinked Sequence
LRFAHYWAQLAS

SEQ ID NO: 291 - protein, 12 aa, Artificial Sequence
  Description of Artificial Sequence: Synthetic peptide
  N-term Ac
  MOD_RES (4)..(4): Alpha-Me R8-octenyl-alanine olefin amino acids connected by an all-carbon i to i+7 crosslinker comprising one double bond
  MOD_RES (11)..(11): Alpha-Me S5-pentenyl-alanine olefin amino acids connected by an all-carbon i to i+4 crosslinker comprising one double bond
  C-term NH2
  Crosslinked Sequence
LKFAHYWAQLAS

SEQ ID NO: 292 - protein, 12 aa, Artificial Sequence
  Description of Artificial Sequence: Synthetic peptide
  N-term Ac
  MOD_RES (4)..(4): Alpha-Me R8-octenyl-alanine olefin amino acids connected by an all-carbon i to i+7 crosslinker comprising one double bond
  MOD_RES (5)..(5): Norleucine
  MOD_RES (11)..(11): Alpha-Me S5-pentenyl-alanine olefin amino acids connected by an all-carbon i to i+4 crosslinker comprising one double bond
  C-term NH2
  Crosslinked Sequence
LTFALYWAQLAS

SEQ ID NO: 293 - protein, 12 aa, Artificial Sequence
  Description of Artificial Sequence: Synthetic peptide
  N-term Ac
  MOD_RES (4)..(4): Alpha-Me R8-octenyl-alanine olefin amino acids connected by an all-carbon i to i+7 crosslinker comprising one double bond
  MOD_RES (11)..(11): Alpha-Me S5-pentenyl-alanine olefin amino acids connected by an all-carbon i to i+4 crosslinker comprising one double bond
  C-term NH2
  Crosslinked Sequence
LTFAVYWAQLAS

SEQ ID NO: 294 - protein, 12 aa, Artificial Sequence
  Description of Artificial Sequence: Synthetic peptide
  N-term Ac
  MOD_RES (4)..(4): Alpha-Me R8-octenyl-alanine olefin amino acids connected by an all-carbon i to i+7 crosslinker comprising one double bond
  MOD_RES (11)..(11): Alpha-Me S5-pentenyl-alanine olefin amino acids connected by an all-carbon i to i+4 crosslinker comprising one double bond
  C-term NH2
  Crosslinked Sequence
LTFAFYWAQLAS

SEQ ID NO: 295 - protein, 12 aa, Artificial Sequence
  Description of Artificial Sequence: Synthetic peptide
  N-term Ac
  MOD_RES (4)..(4): Alpha-Me R8-octenyl-alanine olefin amino acids connected by an all-carbon i to i+7 crosslinker comprising one double bond
  MOD_RES (11)..(11): Alpha-Me S5-pentenyl-alanine olefin amino acids connected by an all-carbon i to i+4 crosslinker comprising one double bond
  C-term NH2
  Crosslinked Sequence
LTFAWYWAQLAS

SEQ ID NO: 296 - protein, 12 aa, Artificial Sequence
  Description of Artificial Sequence: Synthetic peptide
  N-term Ac
  MOD_RES (4)..(4): Alpha-Me R8-octenyl-alanine olefin amino acids connected by an all-carbon i to i+7 crosslinker comprising one double bond
  MOD_RES (11)..(11): Alpha-Me S5-pentenyl-alanine olefin amino acids connected by an all-carbon i to i+4 crosslinker comprising one double bond
  C-term NH2
  Crosslinked Sequence
LTFARYWAQLAS

SEQ ID NO: 297 - protein, 12 aa, Artificial Sequence
  Description of Artificial Sequence: Synthetic peptide
  N-term Ac
  MOD_RES (4)..(4): Alpha-Me R8-octenyl-alanine olefin amino acids connected by an all-carbon i to i+7 crosslinker comprising one double bond
  MOD_RES (11)..(11): Alpha-Me S5-pentenyl-alanine olefin amino acids connected by an all-carbon i to i+4 crosslinker comprising one double bond
  C-term NH2
  Crosslinked Sequence
LTFAKYWAQLAS

SEQ ID NO: 298 - protein, 12 aa, Artificial Sequence
  Description of Artificial Sequence: Synthetic peptide
  N-term Ac
  MOD_RES (4)..(4): Alpha-Me R8-octenyl-alanine olefin amino acids connected by an all-carbon i to i+7 crosslinker comprising one double bond
  MOD_RES (6)..(6): Norleucine
  MOD_RES (11)..(11): Alpha-Me S5-pentenyl-alanine olefin amino acids connected by an all-carbon i to i+4 crosslinker comprising one double bond
  C-term NH2
  Crosslinked Sequence
LTFAHLWAQLAS

SEQ ID NO: 299 - protein, 12 aa, Artificial Sequence
  Description of Artificial Sequence: Synthetic peptide
  N-term Ac
  MOD_RES (4)..(4): Alpha-Me R8-octenyl-alanine olefin amino acids connected by an all-carbon i to i+7 crosslinker comprising one double bond
  MOD_RES (11)..(11): Alpha-Me S5-pentenyl-alanine olefin amino acids connected by an all-carbon i to i+4 crosslinker comprising one double bond
  C-term NH2
  Crosslinked Sequence
LTFAHVWAQLAS

SEQ ID NO: 300 - protein, 12 aa, Artificial Sequence
  Description of Artificial Sequence: Synthetic peptide
  N-term Ac
  MOD_RES (4)..(4): Alpha-Me R8-octenyl-alanine olefin amino acids connected by an all-carbon i to i+7 crosslinker comprising one double bond
  MOD_RES (11)..(11): Alpha-Me S5-pentenyl-alanine olefin amino acids connected by an all-carbon i to i+4 crosslinker comprising one double bond
  C-term NH2
  Crosslinked Sequence
LTFAHFWAQLAS

SEQ ID NO: 301 - protein, 12 aa, Artificial Sequence
  Description of Artificial Sequence: Synthetic peptide
  N-term Ac
  MOD_RES (4)..(4): Alpha-Me R8-octenyl-alanine olefin amino acids connected by an all-carbon i to i+7 crosslinker comprising one double bond
  MOD_RES (11)..(11): Alpha-Me S5-pentenyl-alanine olefin amino acids connected by an all-carbon i to i+4 crosslinker comprising one double bond
  C-term NH2
  Crosslinked Sequence
LTFAHWWAQLAS

SEQ ID NO: 302 - protein, 12 aa, Artificial Sequence
  Description of Artificial Sequence: Synthetic peptide
  N-term Ac
  MOD_RES (4)..(4): Alpha-Me R8-octenyl-alanine olefin amino acids connected by an all-carbon i to i+7 crosslinker comprising one double bond
  MOD_RES (11)..(11): Alpha-Me S5-pentenyl-alanine olefin amino acids connected by an all-carbon i to i+4 crosslinker comprising one double bond
  C-term NH2
  Crosslinked Sequence
LTFAHRWAQLAS

SEQ ID NO: 303 - protein, 12 aa, Artificial Sequence
  Description of Artificial Sequence: Synthetic peptide
  N-term Ac
  MOD_RES (4)..(4): Alpha-Me R8-octenyl-alanine olefin amino acids connected by an all-carbon i to i+7 crosslinker comprising one double bond
  MOD_RES (11)..(11): Alpha-Me S5-pentenyl-alanine olefin amino acids connected by an all-carbon i to i+4 crosslinker comprising one double bond
  C-term NH2
  Crosslinked Sequence
LTFAHKWAQLAS

SEQ ID NO: 304 - protein, 12 aa, Artificial Sequence
  Description of Artificial Sequence: Synthetic peptide
  N-term Ac
  MOD_RES (4)..(4): Alpha-Me R8-octenyl-alanine olefin amino acids connected by an all-carbon i to i+7 crosslinker comprising one double bond
  MOD_RES (8)..(8): Norleucine
  MOD_RES (11)..(11): Alpha-Me S5-pentenyl-alanine olefin amino acids connected by an all-carbon i to i+4 crosslinker comprising one double bond
  C-term NH2
  Crosslinked Sequence
LTFAHYWLQLAS

SEQ ID NO: 305 - protein, 12 aa, Artificial Sequence
  Description of Artificial Sequence: Synthetic peptide
  N-term Ac
  MOD_RES (4)..(4): Alpha-Me R8-octenyl-alanine olefin amino acids connected by an all-carbon i to i+7 crosslinker comprising one double bond
  MOD_RES (11)..(11): Alpha-Me S5-pentenyl-alanine olefin amino acids connected by an all-carbon i to i+4 crosslinker comprising one double bond
  C-term NH2
  Crosslinked Sequence
LTFAHYWVQLAS

SEQ ID NO: 306 - protein, 12 aa, Artificial Sequence
  Description of Artificial Sequence: Synthetic peptide
  N-term Ac
  MOD_RES (4)..(4): Alpha-Me R8-octenyl-alanine olefin amino acids connected by an all-carbon i to i+7 crosslinker comprising one double bond
  MOD_RES (11)..(11): Alpha-Me S5-pentenyl-alanine olefin amino acids connected by an all-carbon i to i+4 crosslinker comprising one double bond
  C-term NH2
  Crosslinked Sequence
LTFAHYWFQLAS

SEQ ID NO: 307 - protein, 12 aa, Artificial Sequence
  Description of Artificial Sequence: Synthetic peptide
  N-term Ac
  MOD_RES (4)..(4): Alpha-Me R8-octenyl-alanine olefin amino acids connected by an all-carbon i to i+7 crosslinker comprising one double bond
  MOD_RES (11)..(11): Alpha-Me S5-pentenyl-alanine olefin amino acids connected by an all-carbon i to i+4 crosslinker comprising one double bond
  C-term NH2
  Crosslinked Sequence
LTFAHYWWQLAS

SEQ ID NO: 308 - protein, 12 aa, Artificial Sequence
  Description of Artificial Sequence: Synthetic peptide
  N-term Ac
  MOD_RES (4)..(4): Alpha-Me R8-octenyl-alanine olefin amino acids connected by an all-carbon i to i+7 crosslinker comprising one double bond
  MOD_RES (11)..(11): Alpha-Me S5-pentenyl-alanine olefin amino acids connected by an all-carbon i to i+4 crosslinker comprising one double bond
  C-term NH2
  Crosslinked Sequence
LTFAHYWKQLAS

SEQ ID NO: 309 - protein, 12 aa, Artificial Sequence
  Description of Artificial Sequence: Synthetic peptide
  N-term Ac
  MOD_RES (4)..(4): Alpha-Me R8-octenyl-alanine olefin amino acids connected by an all-carbon i to i+7 crosslinker comprising one double bond
  MOD_RES (9)..(9): Norleucine
  MOD_RES (11)..(11): Alpha-Me S5-pentenyl-alanine olefin amino acids connected by an all-carbon i to i+4 crosslinker comprising one double bond
  C-term NH2
  Crosslinked Sequence
LTFAHYWALLAS

SEQ ID NO: 310 - protein, 12 aa, Artificial Sequence
  Description of Artificial Sequence: Synthetic peptide
  N-term Ac
  MOD_RES (4)..(4): Alpha-Me R8-octenyl-alanine olefin amino acids connected by an all-carbon i to i+7 crosslinker comprising one double bond
  MOD_RES (11)..(11): Alpha-Me S5-pentenyl-alanine olefin amino acids connected by an all-carbon i to i+4 crosslinker comprising one double bond
  C-term NH2
  Crosslinked Sequence
LTFAHYWAVLAS

SEQ ID NO: 311 - protein, 12 aa, Artificial Sequence
  Description of Artificial Sequence: Synthetic peptide
  N-term Ac
  MOD_RES (4)..(4): Alpha-Me R8-octenyl-alanine olefin amino acids connected by an all-carbon i to i+7 crosslinker comprising one double bond
  MOD_RES (11)..(11): Alpha-Me S5-pentenyl-alanine olefin amino acids connected by an all-carbon i to i+4 crosslinker comprising one double bond
  C-term NH2
  Crosslinked Sequence
LTFAHYWAFLAS

SEQ ID NO: 312 - protein, 12 aa, Artificial Sequence
  Description of Artificial Sequence: Synthetic peptide
  N-term Ac
  MOD_RES (4)..(4): Alpha-Me R8-octenyl-alanine olefin amino acids connected by an all-carbon i to i+7 crosslinker comprising one double bond
  MOD_RES (11)..(11): Alpha-Me S5-pentenyl-alanine olefin amino acids connected by an all-carbon i to i+4 crosslinker comprising one double bond
  C-term NH2
  Crosslinked Sequence
LTFAHYWAWLAS

SEQ ID NO: 313 - protein, 12 aa, Artificial Sequence
  Description of Artificial Sequence: Synthetic peptide
  N-term Ac
  MOD_RES (4)..(4): Alpha-Me R8-octenyl-alanine olefin amino acids connected by an all-carbon i to i+7 crosslinker comprising one double bond
  MOD_RES (11)..(11): Alpha-Me S5-pentenyl-alanine olefin amino acids connected by an all-carbon i to i+4 crosslinker comprising one double bond
  C-term NH2
  Crosslinked Sequence
LTFAHYWARLAS

SEQ ID NO: 314 - protein, 12 aa, Artificial Sequence
  Description of Artificial Sequence: Synthetic peptide
  N-term Ac
  MOD_RES (4)..(4): Alpha-Me R8-octenyl-alanine olefin amino acids connected by an all-carbon i to i+7 crosslinker comprising one double bond
  MOD_RES (11)..(11): Alpha-Me S5-pentenyl-alanine olefin amino acids connected by an all-carbon i to i+4 crosslinker comprising one double bond
  MOD_RES (12)..(12): Norleucine
  C-term NH2
  Crosslinked Sequence
LTFAHYWAQLAL

SEQ ID NO: 315 - protein, 12 aa, Artificial Sequence
  Description of Artificial Sequence: Synthetic peptide
  N-term Ac
  MOD_RES (4)..(4): Alpha-Me R8-octenyl-alanine olefin amino acids connected by an all-carbon i to i+7 crosslinker comprising one double bond
  MOD_RES (11)..(11): Alpha-Me S5-pentenyl-alanine olefin amino acids connected by an all-carbon i to i+4 crosslinker comprising one double bond
  C-term NH2
  Crosslinked Sequence
LTFAHYWAQLAV

SEQ ID NO: 316 - protein, 12 aa, Artificial Sequence
  Description of Artificial Sequence: Synthetic peptide
  N-term Ac
  MOD_RES (4)..(4): Alpha-Me R8-octenyl-alanine olefin amino acids connected by an all-carbon i to i+7 crosslinker comprising one double bond
  MOD_RES (11)..(11): Alpha-Me S5-pentenyl-alanine olefin amino acids connected by an all-carbon i to i+4 crosslinker comprising one double bond
  C-term NH2
  Crosslinked Sequence
LTFAHYWAQLAF

SEQ ID NO: 317 - protein, 12 aa, Artificial Sequence
  Description of Artificial Sequence: Synthetic peptide
  N-term Ac
  MOD_RES (4)..(4): Alpha-Me R8-octenyl-alanine olefin amino acids connected by an all-carbon i to i+7 crosslinker comprising one double bond
  MOD_RES (11)..(11): Alpha-Me S5-pentenyl-alanine olefin amino acids connected by an all-carbon i to i+4 crosslinker comprising one double bond
  C-term NH2
  Crosslinked Sequence
LTFAHYWAQLAW

SEQ ID NO: 318 - protein, 12 aa, Artificial Sequence
  Description of Artificial Sequence: Synthetic peptide
  N-term Ac
  MOD_RES (4)..(4): Alpha-Me R8-octenyl-alanine olefin amino acids connected by an all-carbon i to i+7 crosslinker comprising one double bond
  MOD_RES (11)..(11): Alpha-Me S5-pentenyl-alanine olefin amino acids connected by an all-carbon i to i+4 crosslinker comprising one double bond
  C-term NH2
  Crosslinked Sequence
LTFAHYWAQLAR

SEQ ID NO: 319 - protein, 12 aa, Artificial Sequence
  Description of Artificial Sequence: Synthetic peptide
  N-term Ac
  MOD_RES (4)..(4): Alpha-Me R8-octenyl-alanine olefin amino acids connected by an all-carbon i to i+7 crosslinker comprising one double bond
  MOD_RES (11)..(11): Alpha-Me S5-pentenyl-alanine olefin amino acids connected by an all-carbon i to i+4 crosslinker comprising one double bond
  C-term NH2
  Crosslinked Sequence
LTFAHYWAQLAK

SEQ ID NO: 320 - protein, 16 aa, Artificial Sequence
  Description of Artificial Sequence: Synthetic peptide
  N-term Ac
  MOD_RES (2)..(2): Alpha-Me R8-octenyl-alanine olefin amino acids connected by an all-carbon i to i+7 crosslinker comprising one double bond
  MOD_RES (9)..(9): Alpha-Me S5-pentenyl-alanine olefin amino acids connected by an all-carbon i to i+4 crosslinker comprising one double bond
  MOD_RES (14)..(14): 2-aminoisobutyric acid
  C-term NH2
  Crosslinked Sequence
QAQQTFSNAWRLLXQN

SEQ ID NO: 321 - protein, 16 aa, Artificial Sequence
  Description of Artificial Sequence: Synthetic peptide
  N-term Ac
  MOD_RES (5)..(5): Alpha-Me R8-octenyl-alanine olefin amino acids connected by an all-carbon i to i+7 crosslinker comprising one double bond
  MOD_RES (12)..(12): Alpha-Me S5-pentenyl-alanine olefin amino acids connected by an all-carbon i to i+4 crosslinker comprising one double bond
  MOD_RES (14)..(14): 2-aminoisobutyric acid
  C-term NH2
  Crosslinked Sequence
QSQQAFSNLWRALXQN

SEQ ID NO: 322 - protein, 12 aa, Artificial Sequence
  Description of Artificial Sequence: Synthetic peptide
  N-term Ac
  MOD_RES (3)..(3): 2-Pyridylalanine
  MOD_RES (4)..(4): Alpha-Me R8-octenyl-alanine olefin amino acids connected by an all-carbon i to i+7 crosslinker comprising one double bond
  MOD_RES (11)..(11): Alpha-Me S5-pentenyl-alanine olefin amino acids connected by an all-carbon i to i+4 crosslinker comprising one double bond
  C-term NH2
  Crosslinked Sequence
LTAAHYWAQLAS

SEQ ID NO: 323 - protein, 12 aa, Artificial Sequence
  Description of Artificial Sequence: Synthetic peptide
  N-term Ac
  MOD_RES (3)..(3): 3-Pyridylalanine
  MOD_RES (4)..(4): Alpha-Me R8-octenyl-alanine olefin amino acids connected by an all-carbon i to i+7 crosslinker comprising one double bond
  MOD_RES (11)..(11): Alpha-Me S5-pentenyl-alanine olefin amino acids connected by an all-carbon i to i+4 crosslinker comprising one double bond
  C-term NH2
  Crosslinked Sequence
LTAAHYWAQLAS

SEQ ID NO: 324 - protein, 12 aa, Artificial Sequence
  Description of Artificial Sequence: Synthetic peptide
  N-term Ac
  MOD_RES (3)..(3): 4-Pyridylalanine
  MOD_RES (4)..(4): Alpha-Me R8-octenyl-alanine olefin amino acids connected by an all-carbon i to i+7 crosslinker comprising one double bond
  MOD_RES (11)..(11): Alpha-Me S5-pentenyl-alanine olefin amino acids connected by an all-carbon i to i+4 crosslinker comprising one double bond
  C-term NH2
  Crosslinked Sequence
LTAAHYWAQLAS

SEQ ID NO: 325 - protein, 12 aa, Artificial Sequence
  Description of Artificial Sequence: Synthetic peptide
  N-term Ac
  MOD_RES (3)..(3): Phe-2CF3
  MOD_RES (4)..(4): Alpha-Me R8-octenyl-alanine olefin amino acids connected by an all-carbon i to i+7 crosslinker comprising one double bond
  MOD_RES (11)..(11): Alpha-Me S5-pentenyl-alanine olefin amino acids connected by an all-carbon i to i+4 crosslinker comprising one double bond
  C-term NH2
  Crosslinked Sequence
LTFAHYWAQLAS

SEQ ID NO: 326 - protein, 12 aa, Artificial Sequence
  Description of Artificial Sequence: Synthetic peptide
  N-term Ac
  MOD_RES (3)..(3): Phe-2CN
  MOD_RES (4)..(4): Alpha-Me R8-octenyl-alanine olefin amino acids connected by an all-carbon i to i+7 crosslinker comprising one double bond
  MOD_RES (11)..(11): Alpha-Me S5-pentenyl-alanine olefin amino acids connected by an all-carbon i to i+4 crosslinker comprising one double bond
  C-term NH2
  Crosslinked Sequence
LTFAHYWAQLAS

SEQ ID NO: 327 - protein, 12 aa, Artificial Sequence
  Description of Artificial Sequence: Synthetic peptide
  N-term Ac
  MOD_RES (3)..(3): Phe-2Me
  MOD_RES (4)..(4): Alpha-Me R8-octenyl-alanine olefin amino acids connected by an all-carbon i to i+7 crosslinker comprising one double bond
  MOD_RES (11)..(11): Alpha-Me S5-pentenyl-alanine olefin amino acids connected by an all-carbon i to i+4 crosslinker comprising one double bond
  C-term NH2
  Crosslinked Sequence
LTFAHYWAQLAS

SEQ ID NO: 328 - protein, 12 aa, Artificial Sequence
  Description of Artificial Sequence: Synthetic peptide
  N-term Ac
  MOD_RES (3)..(3): Phe-3Cl
  MOD_RES (4)..(4): Alpha-Me R8-octenyl-alanine olefin amino acids connected by an all-carbon i to i+7 crosslinker comprising one double bond
  MOD_RES (11)..(11): Alpha-Me S5-pentenyl-alanine olefin amino acids connected by an all-carbon i to i+4 crosslinker comprising one double bond
  C-term NH2
  Crosslinked Sequence
LTFAHYWAQLAS

SEQ ID NO: 329 - protein, 12 aa, Artificial Sequence
  Description of Artificial Sequence: Synthetic peptide
  N-term Ac
  MOD_RES (3)..(3): Phe-4CF3
  MOD_RES (4)..(4): Alpha-Me R8-octenyl-alanine olefin amino acids connected by an all-carbon i to i+7 crosslinker comprising one double bond
  MOD_RES (11)..(11): Alpha-Me S5-pentenyl-alanine olefin amino acids connected by an all-carbon i to i+4 crosslinker comprising one double bond
  C-term NH2
  Crosslinked Sequence
LTFAHYWAQLAS

SEQ ID NO: 330 - protein, 12 aa, Artificial Sequence
  Description of Artificial Sequence: Synthetic peptide
  N-term Ac
  MOD_RES (3)..(3): Phe-4tBu
  MOD_RES (4)..(4): Alpha-Me R8-octenyl-alanine olefin amino acids connected by an all-carbon i to i+7 crosslinker comprising one double bond
  MOD_RES (11)..(11): Alpha-Me S5-pentenyl-alanine olefin amino acids connected by an all-carbon i to i+4 crosslinker comprising one double bond
  C-term NH2
  Crosslinked Sequence
LTFAHYWAQLAS

SEQ ID NO: 331 - protein, 12 aa, Artificial Sequence
  Description of Artificial Sequence: Synthetic peptide
  N-term Ac
  MOD_RES (3)..(3): Phe-5F
  MOD_RES (4)..(4): Alpha-Me R8-octenyl-alanine olefin amino acids connected by an all-carbon i to i+7 crosslinker comprising one double bond
  MOD_RES (11)..(11): Alpha-Me S5-pentenyl-alanine olefin amino acids connected by an all-carbon i to i+4 crosslinker comprising one double bond
  C-term NH2
  Crosslinked Sequence
LTFAHYWAQLAS

SEQ ID NO: 332 - protein, 12 aa, Artificial Sequence
  Description of Artificial Sequence: Synthetic peptide
  N-term Ac
  MOD_RES (4)..(4): Alpha-Me R8-octenyl-alanine olefin amino acids connected by an all-carbon i to i+7 crosslinker comprising one double bond
  MOD_RES (7)..(7): 3Bth-Ala
  MOD_RES (11)..(11): Alpha-Me S5-pentenyl-alanine olefin amino acids connected by an all-carbon i to i+4 crosslinker comprising one double bond
  C-term NH2
  Crosslinked Sequence
LTFAHYAAQLAS

SEQ ID NO: 333 - protein, 12 aa, Artificial Sequence
  Description of Artificial Sequence: Synthetic peptide
  N-term Ac
  MOD_RES (3)..(3): Phe-2Br
  MOD_RES (4)..(4): Alpha-Me R8-octenyl-alanine olefin amino acids connected by an all-carbon i to i+7 crosslinker comprising one double bond
  MOD_RES (11)..(11): Alpha-Me S5-pentenyl-alanine olefin amino acids connected by an all-carbon i to i+4 crosslinker comprising one double bond
  C-term NH2
  Crosslinked Sequence
LTFAHYWAQLAS

SEQ ID NO: 334 - protein, 12 aa, Artificial Sequence
  Description of Artificial Sequence: Synthetic peptide
  N-term Ac
  MOD_RES (3)..(3): Phe-4Br
  MOD_RES (4)..(4): Alpha-Me R8-octenyl-alanine olefin amino acids connected by an all-carbon i to i+7 crosslinker comprising one double bond
  MOD_RES (11)..(11): Alpha-Me S5-pentenyl-alanine olefin amino acids connected by an all-carbon i to i+4 crosslinker comprising one double bond
  C-term NH2
  Crosslinked Sequence
LTFAHYWAQLAS

SEQ ID NO: 335 - protein, 12 aa, Artificial Sequence
  Description of Artificial Sequence: Synthetic peptide
  N-term Ac
  MOD_RES (3)..(3): Phe-2Cl
  MOD_RES (4)..(4): Alpha-Me R8-octenyl-alanine olefin amino acids connected by an all-carbon i to i+7 crosslinker comprising one double bond
  MOD_RES (11)..(11): Alpha-Me S5-pentenyl-alanine olefin amino acids connected by an all-carbon i to i+4 crosslinker comprising one double bond
  C-term NH2
  Crosslinked Sequence
LTFAHYWAQLAS

SEQ ID NO: 336 - protein, 12 aa, Artificial Sequence
  Description of Artificial Sequence: Synthetic peptide
  N-term Ac
  MOD_RES (3)..(3): Phe-4Cl
  MOD_RES (4)..(4): Alpha-Me R8-octenyl-alanine olefin amino acids connected by an all-carbon i to i+7 crosslinker comprising one double bond
  MOD_RES (11)..(11): Alpha-Me S5-pentenyl-alanine olefin amino acids connected by an all-carbon i to i+4 crosslinker comprising one double bond
  C-term NH2
  Crosslinked Sequence
LTFAHYWAQLAS

SEQ ID NO: 337 - protein, 12 aa, Artificial Sequence
  Description of Artificial Sequence: Synthetic peptide
  N-term Ac
  MOD_RES (3)..(3): Phe-3CN
  MOD_RES (4)..(4): Alpha-Me R8-octenyl-alanine olefin amino acids connected by an all-carbon i to i+7 crosslinker comprising one double bond
  MOD_RES (11)..(11): Alpha-Me S5-pentenyl-alanine olefin amino acids connected by an all-carbon i to i+4 crosslinker comprising one double bond
  C-term NH2
  Crosslinked Sequence
LTFAHYWAQLAS

SEQ ID NO: 338 - protein, 12 aa, Artificial Sequence
  Description of Artificial Sequence: Synthetic peptide
  N-term Ac
  MOD_RES (3)..(3): Phe-4CN
  MOD_RES (4)..(4): Alpha-Me R8-octenyl-alanine olefin amino acids connected by an all-carbon i to i+7 crosslinker comprising one double bond
  MOD_RES (11)..(11): Alpha-Me S5-pentenyl-alanine olefin amino acids connected by an all-carbon i to i+4 crosslinker comprising one double bond
  C-term NH2
  Crosslinked Sequence
LTFAHYWAQLAS

SEQ ID NO: 339 - protein, 12 aa, Artificial Sequence
  Description of Artificial Sequence: Synthetic peptide
  N-term Ac
  MOD_RES (3)..(3): Phe-34Cl2
  MOD_RES (4)..(4): Alpha-Me R8-octenyl-alanine olefin amino acids connected by an all-carbon i to i+7 crosslinker comprising one double bond
  MOD_RES (11)..(11): Alpha-Me S5-pentenyl-alanine olefin amino acids connected by an all-carbon i to i+4 crosslinker comprising one double bond
  C-term NH2
  Crosslinked Sequence
LTFAHYWAQLAS

SEQ ID NO: 340 - protein, 12 aa, Artificial Sequence
  Description of Artificial Sequence: Synthetic peptide
  N-term Ac
  MOD_RES (3)..(3): Phe-34F2
  MOD_RES (4)..(4): Alpha-Me R8-octenyl-alanine olefin amino acids connected by an all-carbon i to i+7 crosslinker comprising one double bond
  MOD_RES (11)..(11): Alpha-Me S5-pentenyl-alanine olefin amino acids connected by an all-carbon i to i+4 crosslinker comprising one double bond
  C-term NH2
  Crosslinked Sequence
LTFAHYWAQLAS

SEQ ID NO: 341 - protein, 12 aa, Artificial Sequence
  Description of Artificial Sequence: Synthetic peptide
  N-term Ac
  MOD_RES (3)..(3): Phe-35F2
  MOD_RES (4)..(4): Alpha-Me R8-octenyl-alanine olefin amino acids connected by an all-carbon i to i+7 crosslinker comprising one double bond
  MOD_RES (11)..(11): Alpha-Me S5-pentenyl-alanine olefin amino acids connected by an all-carbon i to i+4 crosslinker comprising one double bond
  C-term NH2
  Crosslinked Sequence
LTFAHYWAQLAS

SEQ ID NO: 342 - protein, 12 aa, Artificial Sequence
  Description of Artificial Sequence: Synthetic peptide
  N-term Ac
  MOD_RES (3)..(3): 3,3-diphenyl-Ala
  MOD_RES (4)..(4): Alpha-Me R8-octenyl-alanine olefin amino acids connected by an all-carbon i to i+7 crosslinker comprising one double bond
  MOD_RES (11)..(11): Alpha-Me S5-pentenyl-alanine olefin amino acids connected by an all-carbon i to i+4 crosslinker comprising one double bond
  C-term NH2
  Crosslinked Sequence
LTFAHYWAQLAS

SEQ ID NO: 343 - protein, 12 aa, Artificial Sequence
  Description of Artificial Sequence: Synthetic peptide
  N-term Ac
  MOD_RES (3)..(3): Phe-2F
  MOD_RES (4)..(4): Alpha-Me R8-octenyl-alanine olefin amino acids connected by an all-carbon i to i+7 crosslinker comprising one double bond
  MOD_RES (11)..(11): Alpha-Me S5-pentenyl-alanine olefin amino acids connected by an all-carbon i to i+4 crosslinker comprising one double bond
  C-term NH2
  Crosslinked Sequence
LTFAHYWAQLAS

SEQ ID NO: 344 - protein, 12 aa, Artificial Sequence
  Description of Artificial Sequence: Synthetic peptide
  N-term Ac
  MOD_RES (3)..(3): Phe-3F
  MOD_RES (4)..(4): Alpha-Me R8-octenyl-alanine olefin amino acids connected by an all-carbon i to i+7 crosslinker comprising one double bond
  MOD_RES (11)..(11): Alpha-Me S5-pentenyl-alanine olefin amino acids connected by an all-carbon i to i+4 crosslinker comprising one double bond
  C-term NH2
  Crosslinked Sequence
LTFAHYWAQLAS

SEQ ID NO: 345 - protein, 12 aa, Artificial Sequence
  Description of Artificial Sequence: Synthetic peptide
  N-term Ac
  MOD_RES (3)..(3): Phe-4F
  MOD_RES (4)..(4): Alpha-Me R8-octenyl-alanine olefin amino acids connected by an all-carbon i to i+7 crosslinker comprising one double bond
  MOD_RES (11)..(11): Alpha-Me S5-pentenyl-alanine olefin amino acids connected by an all-carbon i to i+4 crosslinker comprising one double bond
  C-term NH2
  Crosslinked Sequence
LTFAHYWAQLAS

SEQ ID NO: 346 - protein, 12 aa, Artificial Sequence
  Description of Artificial Sequence: Synthetic peptide
  N-term Ac
  MOD_RES (3)..(3): Phe-4I
  MOD_RES (4)..(4): Alpha-Me R8-octenyl-alanine olefin amino acids connected by an all-carbon i to i+7 crosslinker comprising one double bond
  MOD_RES (11)..(11): Alpha-Me S5-pentenyl-alanine olefin amino acids connected by an all-carbon i to i+4 crosslinker comprising one double bond
  C-term NH2
  Crosslinked Sequence
LTFAHYWAQLAS

SEQ ID NO: 347 - protein, 12 aa, Artificial Sequence
  Description of Artificial Sequence: Synthetic peptide
  N-term Ac
  MOD_RES (3)..(3): Phe-3Me
  MOD_RES (4)..(4): Alpha-Me R8-octenyl-alanine olefin amino acids connected by an all-carbon i to i+7 crosslinker comprising one double bond
  MOD_RES (11)..(11): Alpha-Me S5-pentenyl-alanine olefin amino acids connected by an all-carbon i to i+4 crosslinker comprising one double bond
  C-term NH2
  Crosslinked Sequence
LTFAHYWAQLAS

SEQ ID NO: 348 - protein, 12 aa, Artificial Sequence
  Description of Artificial Sequence: Synthetic peptide
  N-term Ac
  MOD_RES (3)..(3): Phe-4Me
  MOD_RES (4)..(4): Alpha-Me R8-octenyl-alanine olefin amino acids connected by an all-carbon i to i+7 crosslinker comprising one double bond
  MOD_RES (11)..(11): Alpha-Me S5-pentenyl-alanine olefin amino acids connected by an all-carbon i to i+4 crosslinker comprising one double bond
  C-term NH2
  Crosslinked Sequence
LTFAHYWAQLAS

SEQ ID NO: 349 - protein, 12 aa, Artificial Sequence
  Description of Artificial Sequence: Synthetic peptide
  N-term Ac
  MOD_RES (3)..(3): 1-Naphthylalanine
  MOD_RES (4)..(4): Alpha-Me R8-octenyl-alanine olefin amino acids connected by an all-carbon i to i+7 crosslinker comprising one double bond
  MOD_RES (11)..(11): Alpha-Me S5-pentenyl-alanine olefin amino acids connected by an all-carbon i to i+4 crosslinker comprising one double bond
  C-term NH2
  Crosslinked Sequence
LTAAHYWAQLAS

SEQ ID NO: 350 - protein, 12 aa, Artificial Sequence
  Description of Artificial Sequence: Synthetic peptide
  N-term Ac
  MOD_RES (3)..(3): 2-Naphthylalanine
  MOD_RES (4)..(4): Alpha-Me R8-octenyl-alanine olefin amino acids connected by an all-carbon i to i+7 crosslinker comprising one double bond
  MOD_RES (11)..(11): Alpha-Me S5-pentenyl-alanine olefin amino acids connected by an all-carbon i to i+4 crosslinker comprising one double bond
  C-term NH2
  Crosslinked Sequence
LTAAHYWAQLAS

SEQ ID NO: 351 - protein, 12 aa, Artificial Sequence
  Description of Artificial Sequence: Synthetic peptide
  N-term Ac
  MOD_RES (3)..(3): Phe-3CF3
  MOD_RES (4)..(4): Alpha-Me R8-octenyl-alanine olefin amino acids connected by an all-carbon i to i+7 crosslinker comprising one double bond
  MOD_RES (11)..(11): Alpha-Me S5-pentenyl-alanine olefin amino acids connected by an all-carbon i to i+4 crosslinker comprising one double bond
  C-term NH2
  Crosslinked Sequence
LTFAHYWAQLAS

SEQ ID NO: 352 - protein, 12 aa, Artificial Sequence
  Description of Artificial Sequence: Synthetic peptide
  N-term Ac
  MOD_RES (3)..(3): Phe-4NO2
  MOD_RES (4)..(4): Alpha-Me R8-octenyl-alanine olefin amino acids connected by an all-carbon i to i+7 crosslinker comprising one double bond
  MOD_RES (11)..(11): Alpha-Me S5-pentenyl-alanine olefin amino acids connected by an all-carbon i to i+4 crosslinker comprising one double bond
  C-term NH2
  Crosslinked Sequence
LTFAHYWAQLAS

SEQ ID NO: 353 - protein, 12 aa, Artificial Sequence
  Description of Artificial Sequence: Synthetic peptide
  N-term Ac
  MOD_RES (3)..(3): Phe-3NO2
  MOD_RES (4)..(4): Alpha-Me R8-octenyl-alanine olefin amino acids connected by an all-carbon i to i+7 crosslinker comprising one double bond
  MOD_RES (11)..(11): Alpha-Me S5-pentenyl-alanine olefin amino acids connected by an all-carbon i to i+4 crosslinker comprising one double bond
  C-term NH2
  Crosslinked Sequence
LTFAHYWAQLAS

SEQ ID NO: 354 - protein, 12 aa, Artificial Sequence
  Description of Artificial Sequence: Synthetic peptide
  N-term Ac
  MOD_RES (4)..(4): Alpha-Me R8-octenyl-alanine olefin amino acids connected by an all-carbon i to i+7 crosslinker comprising one double bond
  MOD_RES (5)..(5): 2Thi
  MOD_RES (11)..(11): Alpha-Me S5-pentenyl-alanine olefin amino acids connected by an all-carbon i to i+4 crosslinker comprising one double bond
  C-term NH2
  Crosslinked Sequence
LTFAAYWAQLAS

SEQ ID NO: 355 - protein, 12 aa, Artificial Sequence
  Description of Artificial Sequence: Synthetic peptide
  N-term Ac
  MOD_RES (4)..(4): Alpha-Me R8-octenyl-alanine olefin amino acids connected by an all-carbon i to i+7 crosslinker comprising one double bond
  MOD_RES (6)..(6): Biphenylalanine
  MOD_RES (11)..(11): Alpha-Me S5-pentenyl-alanine olefin amino acids connected by an all-carbon i to i+4 crosslinker comprising one double bond
  C-term NH2
  Crosslinked Sequence
LTFAHFWAQLAS

SEQ ID NO: 356 - protein, 12 aa, Artificial Sequence
  Description of Artificial Sequence: Synthetic peptide
  N-term Ac
  MOD_RES (4)..(4): Alpha-Me R8-octenyl-alanine olefin amino acids connected by an all-carbon i to i+7 crosslinker comprising one double bond
  MOD_RES (6)..(6): Phe-4tBu
  MOD_RES (11)..(11): Alpha-Me S5-pentenyl-alanine olefin amino acids connected by an all-carbon i to i+4 crosslinker comprising one double bond
  C-term NH2
  Crosslinked Sequence
LTFAHFWAQLAS

SEQ ID NO: 357 - protein, 12 aa, Artificial Sequence
  Description of Artificial Sequence: Synthetic peptide
  N-term Ac
  MOD_RES (4)..(4): Alpha-Me R8-octenyl-alanine olefin amino acids connected by an all-carbon i to i+7 crosslinker comprising one double bond
  MOD_RES (6)..(6): Phe-4CF3
  MOD_RES (11)..(11): Alpha-Me S5-pentenyl-alanine olefin amino acids connected by an all-carbon i to i+4 crosslinker comprising one double bond
  C-term NH2
  Crosslinked Sequence
LTFAHFWAQLAS

SEQ ID NO: 358 - protein, 12 aa, Artificial Sequence
  Description of Artificial Sequence: Synthetic peptide
  N-term Ac
  MOD_RES (4)..(4): Alpha-Me R8-octenyl-alanine olefin amino acids connected by an all-carbon i to i+7 crosslinker comprising one double bond
  MOD_RES (6)..(6): Phe-4Cl
  MOD_RES (11)..(11): Alpha-Me S5-pentenyl-alanine olefin amino acids connected by an all-carbon i to i+4 crosslinker comprising one double bond
  C-term NH2
  Crosslinked Sequence
LTFAHFWAQLAS

SEQ ID NO: 359 - protein, 12 aa, Artificial Sequence
  Description of Artificial Sequence: Synthetic peptide
  N-term Ac
  MOD_RES (4)..(4): Alpha-Me R8-octenyl-alanine olefin amino acids connected by an all-carbon i to i+7 crosslinker comprising one double bond
  MOD_RES (6)..(6): Phe-4Me
  MOD_RES (11)..(11): Alpha-Me S5-pentenyl-alanine olefin amino acids connected by an all-carbon i to i+4 crosslinker comprising one double bond
  C-term NH2
  Crosslinked Sequence
LTFAHFWAQLAS

SEQ ID NO: 360 - protein, 12 aa, Artificial Sequence
  Description of Artificial Sequence: Synthetic peptide
  N-term Ac
  MOD_RES (4)..(4): Alpha-Me R8-octenyl-alanine olefin amino acids connected by an all-carbon i to i+7 crosslinker comprising one double bond
  MOD_RES (6)..(6): Phe-4Br
  MOD_RES (11)..(11): Alpha-Me S5-pentenyl-alanine olefin amino acids connected by an all-carbon i to i+4 crosslinker comprising one double bond
  C-term NH2
  Crosslinked Sequence
LTFAHFWAQLAS

SEQ ID NO: 361 - protein, 12 aa, Artificial Sequence
  Description of Artificial Sequence: Synthetic peptide
  N-term Ac
  MOD_RES (4)..(4): Alpha-Me R8-octenyl-alanine olefin amino acids connected by an all-carbon i to i+7 crosslinker comprising one double bond
  MOD_RES (6)..(6): Phe-4CN
  MOD_RES (11)..(11): Alpha-Me S5-pentenyl-alanine olefin amino acids connected by an all-carbon i to i+4 crosslinker comprising one double bond
  C-term NH2
  Crosslinked Sequence
LTFAHFWAQLAS

SEQ ID NO: 362 - protein, 12 aa, Artificial Sequence
  Description of Artificial Sequence: Synthetic peptide
  N-term Ac
  MOD_RES (4)..(4): Alpha-Me R8-octenyl-alanine olefin amino acids connected by an all-carbon i to i+7 crosslinker comprising one double bond
  MOD_RES (6)..(6): Phe-4NO2
  MOD_RES (11)..(11): Alpha-Me S5-pentenyl-alanine olefin amino acids connected by an all-carbon i to i+4 crosslinker comprising one double bond
  C-term NH2
  Crosslinked Sequence
LTFAHFWAQLAS

SEQ ID NO: 363 - protein, 12 aa, Artificial Sequence
  Description of Artificial Sequence: Synthetic peptide
  N-term Ac
  MOD_RES (4)..(4): Alpha-Me R8-octenyl-alanine olefin amino acids connected by an all-carbon i to i+7 crosslinker comprising one double bond
  MOD_RES (6)..(6): 1-Naphthylalanine
  MOD_RES (11)..(11): Alpha-Me S5-pentenyl-alanine olefin amino acids connected by an all-carbon i to i+4 crosslinker comprising one double bond
  C-term NH2
  Crosslinked Sequence
LTFAHAWAQLAS

SEQ ID NO: 364 - protein, 12 aa, Artificial Sequence
  Description of Artificial Sequence: Synthetic peptide
  N-term Ac
  MOD_RES (4)..(4): Alpha-Me R8-octenyl-alanine olefin amino acids connected by an all-carbon i to i+7 crosslinker comprising one double bond
  MOD_RES (6)..(6): 2-Naphthylalanine
  MOD_RES (11)..(11): Alpha-Me S5-pentenyl-alanine olefin amino acids connected by an all-carbon i to i+4 crosslinker comprising one double bond
  C-term NH2
  Crosslinked Sequence
LTFAHAWAQLAS

SEQ ID NO: 365 - protein, 11 aa, Artificial Sequence
  Description of Artificial Sequence: Synthetic peptide
  N-term Ac
  MOD_RES (4)..(4): Alpha-Me R8-octenyl-alanine olefin amino acids connected by an all-carbon i to i+7 crosslinker comprising one double bond
  MOD_RES (10)..(10): Alpha-Me S5-pentenyl-alanine olefin amino acids connected by an all-carbon i to i+4 crosslinker comprising one double bond
  C-term NH2
  Crosslinked Sequence
LTFAHWAQLAS

SEQ ID NO: 366 - protein, 12 aa, Artificial Sequence
  Description of Artificial Sequence: Synthetic peptide
  N-term Ac
  MOD_RES (4)..(4): Alpha-Me R8-octenyl-alanine olefin amino acids connected by an all-carbon i to i+7 crosslinker comprising one double bond
  MOD_RES (7)..(7): 1-Naphthylalanine
  MOD_RES (11)..(11): Alpha-Me S5-pentenyl-alanine olefin amino acids connected by an all-carbon i to i+4 crosslinker comprising one double bond
  C-term NH2
  Crosslinked Sequence
LTFAHYAAQLAS

SEQ ID NO: 367 - protein, 12 aa, Artificial Sequence
  Description of Artificial Sequence: Synthetic peptide
  N-term Ac
  MOD_RES (4)..(4): Alpha-Me R8-octenyl-alanine olefin amino acids connected by an all-carbon i to i+7 crosslinker comprising one double bond
  MOD_RES (7)..(7): 2-Naphthylalanine
  MOD_RES (11)..(11): Alpha-Me S5-pentenyl-alanine olefin amino acids connected by an all-carbon i to i+4 crosslinker comprising one double bond
  C-term NH2
  Crosslinked Sequence
LTFAHYAAQLAS

SEQ ID NO: 368 - protein, 12 aa, Artificial Sequence
  Description of Artificial Sequence: Synthetic peptide
  N-term Ac
  MOD_RES (4)..(4): Alpha-Me R8-octenyl-alanine olefin amino acids connected by an all-carbon i to i+7 crosslinker comprising one double bond
  MOD_RES (11)..(11): Alpha-Me S5-pentenyl-alanine olefin amino acids connected by an all-carbon i to i+4 crosslinker comprising one double bond
  C-term NH2
  Crosslinked Sequence
LTFAHYWAQIAS

SEQ ID NO: 369 - protein, 12 aa, Artificial Sequence
  Description of Artificial Sequence: Synthetic peptide
  N-term Ac
  MOD_RES (4)..(4): Alpha-Me R8-octenyl-alanine olefin amino acids connected by an all-carbon i to i+7 crosslinker comprising one double bond
  MOD_RES (10)..(10): Norleucine
  MOD_RES (11)..(11): Alpha-Me S5-pentenyl-alanine olefin amino acids connected by an all-carbon i to i+4 crosslinker comprising one double bond
  C-term NH2
  Crosslinked Sequence
LTFAHYWAQLAS

SEQ ID NO: 370 - protein, 12 aa, Artificial Sequence
  Description of Artificial Sequence: Synthetic peptide
  N-term Ac
  MOD_RES (4)..(4): Alpha-methyl R8-octenyl-alanine olefin amino acid connected by an all-carbon crosslinker comprising one double bond in trans configuration
  MOD_RES (11)..(11): Alpha-methyl S5-pentenyl-alanine olefin amino acid connected by an all-carbon crosslinker comprising one double bond in trans configuration
  C-term NH2
  Crosslinked Sequence
LTFAHYWAQLAA

SEQ ID NO: 371 - protein, 12 aa, Artificial Sequence
  Description of Artificial Sequence: Synthetic peptide
  N-term Ac
  MOD_RES (4)..(4): Alpha-Me R8-octenyl-alanine olefin amino acids connected by an all-carbon i to i+7 crosslinker comprising one double bond
  MOD_RES (11)..(11): Alpha-Me S5-pentenyl-alanine olefin amino acids connected by an all-carbon i to i+4 crosslinker comprising one double bond
  MOD_RES (12)..(12): Abu
  C-term NH2
  Crosslinked Sequence
LTFAHYWAQLAX

SEQ ID NO: 372 - protein, 12 aa, Artificial Sequence
  Description of Artificial Sequence: Synthetic peptide
  N-term Ac
  MOD_RES (4)..(4): Alpha-Me R8-octenyl-alanine olefin amino acids connected by an all-carbon i to i+7 crosslinker comprising one double bond
  MOD_RES (8)..(8): Abu
  MOD_RES (11)..(11): Alpha-Me S5-pentenyl-alanine olefin amino acids connected by an all-carbon i to i+4 crosslinker comprising one double bond
  C-term NH2
  Crosslinked Sequence
LTFAHYWXQLAS

SEQ ID NO: 373 - protein, 12 aa, Artificial Sequence
  Description of Artificial Sequence: Synthetic peptide
  N-term Ac
  MOD_RES (4)..(4): Alpha-Me R8-octenyl-alanine olefin amino acids connected by an all-carbon i to i+7 crosslinker comprising one double bond
  MOD_RES (11)..(11): Alpha-Me S5-pentenyl-alanine olefin amino acids connected by an all-carbon i to i+4 crosslinker comprising one double bond
  C-term NH2
  Crosslinked Sequence
LAFAHYWAQLAS

SEQ ID NO: 374 - protein, 12 aa, Artificial Sequence
  Description of Artificial Sequence: Synthetic peptide
  N-term Ac
  MOD_RES (4)..(4): Alpha-Me R8-octenyl-alanine olefin amino acids connected by an all-carbon i to i+7 crosslinker comprising one double bond
  MOD_RES (9)..(9): Norleucine
  MOD_RES (11)..(11): Alpha-Me S5-pentenyl-alanine olefin amino acids connected by an all-carbon i to i+4 crosslinker comprising one double bond
  C-term NH2
  Crosslinked Sequence
LTFANLWALLAQ

SEQ ID NO: 375 - protein, 12 aa, Artificial Sequence
  Description of Artificial Sequence: Synthetic peptide
  N-term Ac
  MOD_RES (4)..(4): Alpha-Me R8-octenyl-alanine olefin amino acids connected by an all-carbon i to i+7 crosslinker comprising one double bond
  MOD_RES (9)..(9): Norleucine
  MOD_RES (11)..(11): Alpha-Me S5-pentenyl-alanine olefin amino acids connected by an all-carbon i to i+4 crosslinker comprising one double bond
  C-term NH2
  Crosslinked Sequence
LTFAALWALLAQ

SEQ ID NO: 376 - protein, 12 aa, Artificial Sequence
  Description of Artificial Sequence: Synthetic peptide
  N-term Ac
  MOD_RES (4)..(4): Alpha-Me R8-octenyl-alanine olefin amino acids connected by an all-carbon i to i+7 crosslinker comprising one double bond
  MOD_RES (9)..(9): Norleucine
  MOD_RES (11)..(11): Alpha-Me S5-pentenyl-alanine olefin amino acids connected by an all-carbon i to i+4 crosslinker comprising one double bond
  C-term NH2
  Crosslinked Sequence
LAFANLWALLAQ

SEQ ID NO: 377 - protein, 10 aa, Artificial Sequence
  Description of Artificial Sequence: Synthetic peptide
  N-term Ac
  MOD_RES (2)..(2): Alpha-Me R8-octenyl-alanine olefin amino acids connected by an all-carbon i to i+7 crosslinker comprising one double bond
  MOD_RES (7)..(7): Aminocyclopropane carboxylic acid residue
  MOD_RES (9)..(9): Alpha-Me S5-pentenyl-alanine olefin amino acids connected by an all-carbon i to i+4 crosslinker comprising one double bond
  C-term NH2
  Crosslinked Sequence
FAAYWAXLAA

SEQ ID NO: 378 - protein, 12 aa, Artificial Sequence
  Description of Artificial Sequence: Synthetic peptide
  N-term Ac
  MOD_RES (4)..(4): Alpha-Me R8-octenyl-alanine olefin amino acids connected by an all-carbon i to i+7 crosslinker comprising one double bond
  MOD_RES (11)..(11): Alpha-Me S5-pentenyl-alanine olefin amino acids connected by an all-carbon i to i+4 crosslinker comprising one double bond
  C-term NH2
  Crosslinked Sequence
LTFAAYWAALAS

SEQ ID NO: 379 - protein, 12 aa, Artificial Sequence
  Description of Artificial Sequence: Synthetic peptide
  N-term Ac
  MOD_RES (4)..(4): Alpha-Me R8-octenyl-alanine olefin amino acids connected by an all-carbon i to i+7 crosslinker comprising one double bond
  MOD_RES (11)..(11): Alpha-Me S5-pentenyl-alanine olefin amino acids connected by an all-carbon i to i+4 crosslinker comprising one double bond
  C-term NH2
  Crosslinked Sequence
LVFAAYWAQLAS

SEQ ID NO: 380 - protein, 12 aa, Artificial Sequence
  Description of Artificial Sequence: Synthetic peptide
  N-term Ac
  MOD_RES (4)..(4): Alpha-Me R8-octenyl-alanine olefin amino acids connected by an all-carbon i to i+7 crosslinker comprising one double bond
  MOD_RES (8)..(8): Abu
  MOD_RES (11)..(11): Alpha-Me S5-pentenyl-alanine olefin amino acids connected by an all-carbon i to i+4 crosslinker comprising one double bond
  C-term NH2
  Crosslinked Sequence
LTFAAYWXQLAS

SEQ ID NO: 381 - protein, 12 aa, Artificial Sequence
  Description of Artificial Sequence: Synthetic peptide
  N-term Ac
  MOD_RES (4)..(4): Alpha-Me R8-octenyl-alanine olefin amino acids connected by an all-carbon i to i+7 crosslinker comprising one double bond
  MOD_RES (8)..(8): Norleucine
  MOD_RES (11)..(11): Alpha-Me S5-pentenyl-alanine olefin amino acids connected by an all-carbon i to i+4 crosslinker comprising one double bond
  C-term NH2
  Crosslinked Sequence
LTFAAYWLQLAS

SEQ ID NO: 382 - protein, 12 aa, Artificial Sequence
  Description of Artificial Sequence: Synthetic peptide
  N-term Ac
  MOD_RES (4)..(4): Alpha-Me R8-octenyl-alanine olefin amino acids connected by an all-carbon i to i+7 crosslinker comprising one double bond
  MOD_RES (5)..(5): Abu
  MOD_RES (11)..(11): Alpha-Me S5-pentenyl-alanine olefin amino acids connected by an all-carbon i to i+4 crosslinker comprising one double bond
  C-term NH2
  Crosslinked Sequence
LTFAXYWAQLAS

SEQ ID NO: 383 - protein, 12 aa, Artificial Sequence
  Description of Artificial Sequence: Synthetic peptide
  N-term Ac
  MOD_RES (4)..(4): Alpha-Me R8-octenyl-alanine olefin amino acids connected by an all-carbon i to i+7 crosslinker comprising one double bond
  MOD_RES (11)..(11): Alpha-Me S5-pentenyl-alanine olefin amino acids connected by an all-carbon i to i+4 crosslinker comprising one double bond
  C-term NH2
  Crosslinked Sequence
LTFAAYWHQLAS

SEQ ID NO: 384 - protein, 12 aa, Artificial Sequence
  Description of Artificial Sequence: Synthetic peptide
  N-term Ac
  MOD_RES (4)..(4): Alpha-Me R8-octenyl-alanine olefin amino acids connected by an all-carbon i to i+7 crosslinker comprising one double bond
  MOD_RES (11)..(11): Alpha-Me S5-pentenyl-alanine olefin amino acids connected by an all-carbon i to i+4 crosslinker comprising one double bond
  C-term NH2
  Crosslinked Sequence
LTFAAYWKQLAS

SEQ ID NO: 385 - protein, 12 aa, Artificial Sequence
  Description of Artificial Sequence: Synthetic peptide
  N-term Ac
  MOD_RES (4)..(4): Alpha-Me R8-octenyl-alanine olefin amino acids connected by an all-carbon i to i+7 crosslinker comprising one double bond
  MOD_RES (8)..(8): Ornithine
  MOD_RES (11)..(11): Alpha-Me S5-pentenyl-alanine olefin amino acids connected by an all-carbon i to i+4 crosslinker comprising one double bond
  C-term NH2
  Crosslinked Sequence
LTFAAYWXQLAS

SEQ ID NO: 386 - protein, 12 aa, Artificial Sequence
  Description of Artificial Sequence: Synthetic peptide
  N-term Ac
  MOD_RES (4)..(4): Alpha-Me R8-octenyl-alanine olefin amino acids connected by an all-carbon i to i+7 crosslinker comprising one double bond
  MOD_RES (11)..(11): Alpha-Me S5-pentenyl-alanine olefin amino acids connected by an all-carbon i to i+4 crosslinker comprising one double bond
  C-term NH2
  Crosslinked Sequence
LTFAAYWRQLAS

SEQ ID NO: 387 - protein, 12 aa, Artificial Sequence
  Description of Artificial Sequence: Synthetic peptide
  N-term Ac
  MOD_RES (4)..(4): Alpha-Me R8-octenyl-alanine olefin amino acids connected by an all-carbon i to i+7 crosslinker comprising one double bond
  MOD_RES (11)..(11): Alpha-Me S5-pentenyl-alanine olefin amino acids connected by an all-carbon i to i+4 crosslinker comprising one double bond
  C-term NH2
  Crosslinked Sequence
LTFAAYWSQLAS

SEQ ID NO: 388 - protein, 12 aa, Artificial Sequence
  Description of Artificial Sequence: Synthetic peptide
  N-term Ac
  MOD_RES (4)..(4): Alpha-Me R8-octenyl-alanine olefin amino acids connected by an all-carbon i to i+7 crosslinker comprising one double bond
  MOD_RES (11)..(11): Alpha-Me S5-pentenyl-alanine olefin amino acids connected by an all-carbon i to i+4 crosslinker comprising one double bond
  C-term NH2
  Crosslinked Sequence
LTFAAYWRALAS

SEQ ID NO: 389 - protein, 12 aa, Artificial Sequence
  Description of Artificial Sequence: Synthetic peptide
  N-term Ac
  MOD_RES (4)..(4): Alpha-Me R8-octenyl-alanine olefin amino acids connected by an all-carbon i to i+7 crosslinker comprising one double bond
  MOD_RES (11)..(11): Alpha-Me S5-pentenyl-alanine olefin amino acids connected by an all-carbon i to i+4 crosslinker comprising one double bond
  C-term NH2
  Crosslinked Sequence
LTFAAYWRQLAA

SEQ ID NO: 390 - protein, 12 aa, Artificial Sequence
  Description of Artificial Sequence: Synthetic peptide
  N-term Ac
  MOD_RES (4)..(4): Alpha-Me R8-octenyl-alanine olefin amino acids connected by an all-carbon i to i+7 crosslinker comprising one double bond
  MOD_RES (11)..(11): Alpha-Me S5-pentenyl-alanine olefin amino acids connected by an all-carbon i to i+4 crosslinker comprising one double bond
  C-term NH2
  Crosslinked Sequence
LTFAAYWRALAA

SEQ ID NO: 391 - protein, 12 aa, Artificial Sequence
  Description of Artificial Sequence: Synthetic peptide
  N-term Ac
  MOD_RES (4)..(4): Alpha-Me R5-pentenyl-alanine olefin amino acids connected by an all-carbon i to i+4 crosslinker comprising one double bond
  MOD_RES (11)..(11): Alpha-Me S8-octenyl-alanine olefin amino acids connected by an all-carbon i to i+7 crosslinker comprising one double bond
  C-term NH2
  Crosslinked Sequence
LTFAHYWAQLAS

SEQ ID NO: 392 - protein, 12 aa, Artificial Sequence
  Description of Artificial Sequence: Synthetic peptide
  N-term Ac
  MOD_RES (4)..(4): Alpha-Me S5-pentenyl-alanine olefin amino acids connected by an all-carbon i to i+4 crosslinker comprising one double bond
  MOD_RES (11)..(11): Alpha-Me R8-octenyl-alanine olefin amino acids connected by an all-carbon i to i+7 crosslinker comprising one double bond
  C-term NH2
  Crosslinked Sequence
LTFAHYWAQLAS

SEQ ID NO: 393 - protein, 12 aa, Artificial Sequence
  Description of Artificial Sequence: Synthetic peptide
  N-term Ac
  MOD_RES (4)..(4): Alpha-Me R8-octenyl-alanine olefin amino acids connected by an all-carbon i to i+7 crosslinker comprising one double bond
  MOD_RES (11)..(11): Alpha-Me S5-pentenyl-alanine olefin amino acids connected by an all-carbon i to i+4 crosslinker comprising one double bond
  C-term NH2
  Crosslinked Sequence
LTFAHYWAALAS

SEQ ID NO: 394 - protein, 12 aa, Artificial Sequence
  Description of Artificial Sequence: Synthetic peptide
  N-term Ac
  MOD_RES (4)..(4): Alpha-Me R8-octenyl-alanine olefin amino acids connected by an all-carbon i to i+7 crosslinker comprising one double bond
  MOD_RES (9)..(9): Abu
  MOD_RES (11)..(11): Alpha-Me S5-pentenyl-alanine olefin amino acids connected by an all-carbon i to i+4 crosslinker comprising one double bond
  C-term NH2
  Crosslinked Sequence
LTFAHYWAXLAS

SEQ ID NO: 395 - protein, 12 aa, Artificial Sequence
  Description of Artificial Sequence: Synthetic peptide
  N-term Ac
  MOD_RES (4)..(4): Alpha-Me R8-octenyl-alanine olefin amino acids connected by an all-carbon i to i+7 crosslinker comprising one double bond
  MOD_RES (11)..(11): Alpha-Me S5-pentenyl-alanine olefin amino acids connected by an all-carbon i to i+4 crosslinker comprising one double bond
  C-term NH2
  Crosslinked Sequence
LTFAHYWALLAS

SEQ ID NO: 396 - protein, 10 aa, Artificial Sequence
  Description of Artificial Sequence: Synthetic peptide
  N-term Ac
  MOD_RES (2)..(2): Alpha-Me R8-octenyl-alanine olefin amino acids connected by an all-carbon i to i+7 crosslinker comprising one double bond
  MOD_RES (9)..(9): Alpha-Me S5-pentenyl-alanine olefin amino acids connected by an all-carbon i to i+4 crosslinker comprising one double bond
  C-term NH2
  Crosslinked Sequence
FAAYWHALAA

SEQ ID NO: 397 - protein, 10 aa, Artificial Sequence
  Description of Artificial Sequence: Synthetic peptide
  N-term Ac
  MOD_RES (2)..(2): Alpha-Me R8-octenyl-alanine olefin amino acids connected by an all-carbon i to i+7 crosslinker comprising one double bond
  MOD_RES (9)..(9): Alpha-Me S5-pentenyl-alanine olefin amino acids connected by an all-carbon i to i+4 crosslinker comprising one double bond
  C-term NH2
  Crosslinked Sequence
FAAYWAALAA

SEQ ID NO: 398 - protein, 10 aa, Artificial Sequence
  Description of Artificial Sequence: Synthetic peptide
  N-term Ac
  MOD_RES (2)..(2): Alpha-Me R8-octenyl-alanine olefin amino acids connected by an all-carbon i to i+7 crosslinker comprising one double bond
  MOD_RES (9)..(9): Alpha-Me S5-pentenyl-alanine olefin amino acids connected by an all-carbon i to i+4 crosslinker comprising one double bond
  C-term NH2
  Crosslinked Sequence
FAAYWSALAA

SEQ ID NO: 399 - protein, 10 aa, Artificial Sequence
  Description of Artificial Sequence: Synthetic peptide
  N-term Ac
  MOD_RES (2)..(2): Alpha-Me R8-octenyl-alanine olefin amino acids connected by an all-carbon i to i+7 crosslinker comprising one double bond
  MOD_RES (9)..(9): Alpha-Me S5-pentenyl-alanine olefin amino acids connected by an all-carbon i to i+4 crosslinker comprising one double bond
  C-term NH2
  Crosslinked Sequence
FAAYWRALAA

SEQ ID NO: 400 - protein, 10 aa, Artificial Sequence
  Description of Artificial Sequence: Synthetic peptide
  N-term Ac
  MOD_RES (2)..(2): Alpha-Me R8-octenyl-alanine olefin amino acids connected by an all-carbon i to i+7 crosslinker comprising one double bond
  MOD_RES (9)..(9): Alpha-Me S5-pentenyl-alanine olefin amino acids connected by an all-carbon i to i+4 crosslinker comprising one double bond
  C-term NH2
  Crosslinked Sequence
FAAYWKALAA

SEQ ID NO: 401 - protein, 10 aa, Artificial Sequence
  Description of Artificial Sequence: Synthetic peptide
  N-term Ac
  MOD_RES (2)..(2): Alpha-Me R8-octenyl-alanine olefin amino acids connected by an all-carbon i to i+7 crosslinker comprising one double bond
  MOD_RES (6)..(6): Ornithine
  MOD_RES (9)..(9): Alpha-Me S5-pentenyl-alanine olefin amino acids connected by an all-carbon i to i+4 crosslinker comprising one double bond
  C-term NH2
  Crosslinked Sequence
FAAYWXALAA

SEQ ID NO: 402 - protein, 10 aa, Artificial Sequence
  Description of Artificial Sequence: Synthetic peptide
  N-term Ac
  MOD_RES (2)..(2): Alpha-Me R8-octenyl-alanine olefin amino acids connected by an all-carbon i to i+7 crosslinker comprising one double bond
  MOD_RES (7)..(7): Aminocyclopropane carboxylic acid residue
  MOD_RES (9)..(9): Alpha-Me S5-pentenyl-alanine olefin amino acids connected by an all-carbon i to i+4 crosslinker comprising one double bond
  C-term NH2
  Crosslinked Sequence
FAVYWEXLAA

SEQ ID NO: 403 - protein, 10 aa, Artificial Sequence
  Description of Artificial Sequence: Synthetic peptide
  N-term Ac
  MOD_RES (2)..(2): Alpha-Me R8-octenyl-alanine olefin amino acids connected by an all-carbon i to i+7 crosslinker comprising one double bond
  MOD_RES (7)..(7): Aminocyclopropane carboxylic acid residue
  MOD_RES (9)..(9): Alpha-Me S5-pentenyl-alanine olefin amino acids connected by an all-carbon i to i+4 crosslinker comprising one double bond
  C-term NH2
  Crosslinked Sequence
FAFYWEXLAA

SEQ ID NO: 404 - protein, 10 aa, Artificial Sequence
  Description of Artificial Sequence: Synthetic peptide
  N-term Ac
  MOD_RES (2)..(2): Alpha-Me R8-octenyl-alanine olefin amino acids connected by an all-carbon i to i+7 crosslinker comprising one double bond
  MOD_RES (7)..(7): Aminocyclopropane carboxylic acid residue
  MOD_RES (9)..(9): Alpha-Me S5-pentenyl-alanine olefin amino acids connected by an all-carbon i to i+4 crosslinker comprising one double bond
  C-term NH2
  Crosslinked Sequence
FAWYWEXLAA

SEQ ID NO: 405 - protein, 10 aa, Artificial Sequence
  Description of Artificial Sequence: Synthetic peptide
  N-term Ac
  MOD_RES (2)..(2): Alpha-Me R8-octenyl-alanine olefin amino acids connected by an all-carbon i to i+7 crosslinker comprising one double bond
  MOD_RES (7)..(7): Aminocyclopropane carboxylic acid residue
  MOD_RES (9)..(9): Alpha-Me S5-pentenyl-alanine olefin amino acids connected by an all-carbon i to i+4 crosslinker comprising one double bond
  C-term NH2
  Crosslinked Sequence
FARYWEXLAA

SEQ ID NO: 406 - protein, 10 aa, Artificial Sequence
  Description of Artificial Sequence: Synthetic peptide
  N-term Ac
  MOD_RES (2)..(2): Alpha-Me R8-octenyl-alanine olefin amino acids connected by an all-carbon i to i+7 crosslinker comprising one double bond
  MOD_RES (7)..(7): Aminocyclopropane carboxylic acid residue
  MOD_RES (9)..(9): Alpha-Me S5-pentenyl-alanine olefin amino acids connected by an all-carbon i to i+4 crosslinker comprising one double bond
  C-term NH2
  Crosslinked Sequence
FAKYWEXLAA

SEQ ID NO: 407 - protein, 10 aa, Artificial Sequence
  Description of Artificial Sequence: Synthetic peptide
  N-term Ac
  MOD_RES (2)..(2): Alpha-Me R8-octenyl-alanine olefin amino acids connected by an all-carbon i to i+7 crosslinker comprising one double bond
  MOD_RES (4)..(4): Norleucine
  MOD_RES (7)..(7): Aminocyclopropane carboxylic acid residue
  MOD_RES (9)..(9): Alpha-Me S5-pentenyl-alanine olefin amino acids connected by an all-carbon i to i+4 crosslinker comprising one double bond
  C-term NH2
  Crosslinked Sequence
FAALWEXLAA

SEQ ID NO: 408 - protein, 10 aa, Artificial Sequence
  Description of Artificial Sequence: Synthetic peptide
  N-term Ac
  MOD_RES (2)..(2): Alpha-Me R8-octenyl-alanine olefin amino acids connected by an all-carbon i to i+7 crosslinker comprising one double bond
  MOD_RES (7)..(7): Aminocyclopropane carboxylic acid residue
  MOD_RES (9)..(9): Alpha-Me S5-pentenyl-alanine olefin amino acids connected by an all-carbon i to i+4 crosslinker comprising one double bond
  C-term NH2
  Crosslinked Sequence
FAAVWEXLAA

SEQ ID NO: 409 - protein, 10 aa, Artificial Sequence
  Description of Artificial Sequence: Synthetic peptide
  N-term Ac
  MOD_RES (2)..(2): Alpha-Me R8-octenyl-alanine olefin amino acids connected by an all-carbon i to i+7 crosslinker comprising one double bond
  MOD_RES (7)..(7): Aminocyclopropane carboxylic acid residue
  MOD_RES (9)..(9): Alpha-Me S5-pentenyl-alanine olefin amino acids connected by an all-carbon i to i+4 crosslinker comprising one double bond
  C-term NH2
  Crosslinked Sequence
FAAFWEXLAA

SEQ ID NO: 410 - protein, 10 aa, Artificial Sequence
  Description of Artificial Sequence: Synthetic peptide
  N-term Ac
  MOD_RES (2)..(2): Alpha-Me R8-octenyl-alanine olefin amino acids connected by an all-carbon i to i+7 crosslinker comprising one double bond
  MOD_RES (7)..(7): Aminocyclopropane carboxylic acid residue
  MOD_RES (9)..(9): Alpha-Me S5-pentenyl-alanine olefin amino acids connected by an all-carbon i to i+4 crosslinker comprising one double bond
  C-term NH2
  Crosslinked Sequence
FAAWWEXLAA

SEQ ID NO: 411 - protein, 10 aa, Artificial Sequence
  Description of Artificial Sequence: Synthetic peptide
  N-term Ac
  MOD_RES (2)..(2): Alpha-Me R8-octenyl-alanine olefin amino acids connected by an all-carbon i to i+7 crosslinker comprising one double bond
  MOD_RES (7)..(7): Aminocyclopropane carboxylic acid residue
  MOD_RES (9)..(9): Alpha-Me S5-pentenyl-alanine olefin amino acids connected by an all-carbon i to i+4 crosslinker comprising one double bond
  C-term NH2
  Crosslinked Sequence
FAARWEXLAA

SEQ ID NO: 412 - protein, 10 aa, Artificial Sequence
  Description of Artificial Sequence: Synthetic peptide
  N-term Ac
  MOD_RES (2)..(2): Alpha-Me R8-octenyl-alanine olefin amino acids connected by an all-carbon i to i+7 crosslinker comprising one double bond
  MOD_RES (7)..(7): Aminocyclopropane carboxylic acid residue
  MOD_RES (9)..(9): Alpha-Me S5-pentenyl-alanine olefin amino acids connected by an all-carbon i to i+4 crosslinker comprising one double bond
  C-term NH2
  Crosslinked Sequence
FAAKWEXLAA

SEQ ID NO: 413 - protein, 10 aa, Artificial Sequence
  Description of Artificial Sequence: Synthetic peptide
  N-term Ac
  MOD_RES (2)..(2): Alpha-Me R8-octenyl-alanine olefin amino acids connected by an all-carbon i to i+7 crosslinker comprising one double bond
  MOD_RES (7)..(7): Aminocyclopropane carboxylic acid residue
  MOD_RES (9)..(9): Alpha-Me S5-pentenyl-alanine olefin amino acids connected by an all-carbon i to i+4 crosslinker comprising one double bond
  C-term NH2
  Crosslinked Sequence
FAAYWVXLAA

SEQ ID NO: 414 - protein, 10 aa, Artificial Sequence
  Description of Artificial Sequence: Synthetic peptide
  N-term Ac
  MOD_RES (2)..(2): Alpha-Me R8-octenyl-alanine olefin amino acids connected by an all-carbon i to i+7 crosslinker comprising one double bond
  MOD_RES (7)..(7): Aminocyclopropane carboxylic acid residue
  MOD_RES (9)..(9): Alpha-Me S5-pentenyl-alanine olefin amino acids connected by an all-carbon i to i+4 crosslinker comprising one double bond
  C-term NH2
  Crosslinked Sequence
FAAYWFXLAA

SEQ ID NO: 415 - protein, 10 aa, Artificial Sequence
  Description of Artificial Sequence: Synthetic peptide
  N-term Ac
  MOD_RES (2)..(2): Alpha-Me R8-octenyl-alanine olefin amino acids connected by an all-carbon i to i+7 crosslinker comprising one double bond
  MOD_RES (7)..(7): Aminocyclopropane carboxylic acid residue
  MOD_RES (9)..(9): Alpha-Me S5-pentenyl-alanine olefin amino acids connected by an all-carbon i to i+4 crosslinker comprising one double bond
  C-term NH2
  Crosslinked Sequence
FAAYWWXLAA

SEQ ID NO: 416 - protein, 10 aa, Artificial Sequence
  Description of Artificial Sequence: Synthetic peptide
  N-term Ac
  MOD_RES (2)..(2): Alpha-Me R8-octenyl-alanine olefin amino acids connected by an all-carbon i to i+7 crosslinker comprising one double bond
  MOD_RES (7)..(7): Aminocyclopropane carboxylic acid residue
  MOD_RES (9)..(9): Alpha-Me S5-pentenyl-alanine olefin amino acids connected by an all-carbon i to i+4 crosslinker comprising one double bond
  C-term NH2
  Crosslinked Sequence
FAAYWRXLAA

SEQ ID NO: 417 - protein, 10 aa, Artificial Sequence
  Description of Artificial Sequence: Synthetic peptide
  N-term Ac
  MOD_RES (2)..(2): Alpha-Me R8-octenyl-alanine olefin amino acids connected by an all-carbon i to i+7 crosslinker comprising one double bond
  MOD_RES (7)..(7): Aminocyclopropane carboxylic acid residue
  MOD_RES (9)..(9): Alpha-Me S5-pentenyl-alanine olefin amino acids connected by an all-carbon i to i+4 crosslinker comprising one double bond
  C-term NH2
  Crosslinked Sequence
FAAYWKXLAA

SEQ ID NO: 418 - protein, 10 aa, Artificial Sequence
  Description of Artificial Sequence: Synthetic peptide
  N-term Ac
  MOD_RES (2)..(2): Alpha-Me R8-octenyl-alanine olefin amino acids connected by an all-carbon i to i+7 crosslinker comprising one double bond
  MOD_RES (9)..(9): Alpha-Me S5-pentenyl-alanine olefin amino acids connected by an all-carbon i to i+4 crosslinker comprising one double bond
  C-term NH2
  Crosslinked Sequence
FAAYWEVLAA

SEQ ID NO: 419 - protein, 10 aa, Artificial Sequence
  Description of Artificial Sequence: Synthetic peptide
  N-term Ac
  MOD_RES (2)..(2): Alpha-Me R8-octenyl-alanine olefin amino acids connected by an all-carbon i to i+7 crosslinker comprising one double bond
  MOD_RES (9)..(9): Alpha-Me S5-pentenyl-alanine olefin amino acids connected by an all-carbon i to i+4 crosslinker comprising one double bond
  C-term NH2
  Crosslinked Sequence
FAAYWEFLAA

SEQ ID NO: 420 - protein, 10 aa, Artificial Sequence
  Description of Artificial Sequence: Synthetic peptide
  N-term Ac
  MOD_RES (2)..(2): Alpha-Me R8-octenyl-alanine olefin amino acids connected by an all-carbon i to i+7 crosslinker comprising one double bond
  MOD_RES (9)..(9): Alpha-Me S5-pentenyl-alanine olefin amino acids connected by an all-carbon i to i+4 crosslinker comprising one double bond
  C-term NH2
  Crosslinked Sequence
FAAYWEWLAA

SEQ ID NO: 421 - protein, 10 aa, Artificial Sequence
  Description of Artificial Sequence: Synthetic peptide
  N-term Ac
  MOD_RES (2)..(2): Alpha-Me R8-octenyl-alanine olefin amino acids connected by an all-carbon i to i+7 crosslinker comprising one double bond
  MOD_RES (9)..(9): Alpha-Me S5-pentenyl-alanine olefin amino acids connected by an all-carbon i to i+4 crosslinker comprising one double bond
  C-term NH2
  Crosslinked Sequence
FAAYWERLAA

SEQ ID NO: 422 - protein, 10 aa, Artificial Sequence
  Description of Artificial Sequence: Synthetic peptide
  N-term Ac
  MOD_RES (2)..(2): Alpha-Me R8-octenyl-alanine olefin amino acids connected by an all-carbon i to i+7 crosslinker comprising one double bond
  MOD_RES (9)..(9): Alpha-Me S5-pentenyl-alanine olefin amino acids connected by an all-carbon i to i+4 crosslinker comprising one double bond
  C-term NH2
  Crosslinked Sequence
FAAYWEKLAA

SEQ ID NO: 423 - protein, 10 aa, Artificial Sequence
  Description of Artificial Sequence: Synthetic peptide
  N-term Ac
  MOD_RES (2)..(2): Alpha-Me R8-octenyl-alanine olefin amino acids connected by an all-carbon i to i+7 crosslinker comprising one double bond
  MOD_RES (7)..(7): Aminocyclopropane carboxylic acid residue
  MOD_RES (9)..(9): Alpha-Me S5-pentenyl-alanine olefin amino acids connected by an all-carbon i to i+4 crosslinker comprising one double bond
  C-term NH2
  Crosslinked Sequence
FAAYWEXLAV

SEQ ID NO: 424 - protein, 10 aa, Artificial Sequence
  Description of Artificial Sequence: Synthetic peptide
  N-term Ac
  MOD_RES (2)..(2): Alpha-Me R8-octenyl-alanine olefin amino acids connected by an all-carbon i to i+7 crosslinker comprising one double bond
  MOD_RES (7)..(7): Aminocyclopropane carboxylic acid residue
  MOD_RES (9)..(9): Alpha-Me S5-pentenyl-alanine olefin amino acids connected by an all-carbon i to i+4 crosslinker comprising one double bond
  C-term NH2
  Crosslinked Sequence
FAAYWEXLAF

SEQ ID NO: 425 - protein, 10 aa, Artificial Sequence
  Description of Artificial Sequence: Synthetic peptide
  N-term Ac
  MOD_RES (2)..(2): Alpha-Me R8-octenyl-alanine olefin amino acids connected by an all-carbon i to i+7 crosslinker comprising one double bond
  MOD_RES (7)..(7): Aminocyclopropane carboxylic acid residue
  MOD_RES (9)..(9): Alpha-Me S5-pentenyl-alanine olefin amino acids connected by an all-carbon i to i+4 crosslinker comprising one double bond
  C-term NH2
  Crosslinked Sequence
FAAYWEXLAW

SEQ ID NO: 426 - protein, 10 aa, Artificial Sequence
  Description of Artificial Sequence: Synthetic peptide
  N-term Ac
  MOD_RES (2)..(2): Alpha-Me R8-octenyl-alanine olefin amino acids connected by an all-carbon i to i+7 crosslinker comprising one double bond
  MOD_RES (7)..(7): Aminocyclopropane carboxylic acid residue
  MOD_RES (9)..(9): Alpha-Me S5-pentenyl-alanine olefin amino acids connected by an all-carbon i to i+4 crosslinker comprising one double bond
  C-term NH2
  Crosslinked Sequence
FAAYWEXLAR

SEQ ID NO: 427 - protein, 10 aa, Artificial Sequence
  Description of Artificial Sequence: Synthetic peptide
  N-term Ac
  MOD_RES (2)..(2): Alpha-Me R8-octenyl-alanine olefin amino acids connected by an all-carbon i to i+7 crosslinker comprising one double bond
  MOD_RES (7)..(7): Aminocyclopropane carboxylic acid residue
  MOD_RES (9)..(9): Alpha-Me S5-pentenyl-alanine olefin amino acids connected by an all-carbon i to i+4 crosslinker comprising one double bond
  C-term NH2
  Crosslinked Sequence
FAAYWEXLAK

SEQ ID NO: 428 - protein, 11 aa, Artificial Sequence
  Description of Artificial Sequence: Synthetic peptide
  N-term Ac
  MOD_RES (2)..(2): Alpha-Me R8-octenyl-alanine olefin amino acids connected by an all-carbon i to i+7 crosslinker comprising one double bond
  MOD_RES (7)..(7): Aminocyclopropane carboxylic acid residue
  MOD_RES (9)..(9): Alpha-Me S5-pentenyl-alanine olefin amino acids connected by an all-carbon i to i+4 crosslinker comprising one double bond
  C-term NH2
  Crosslinked Sequence
FAAYWEXLAAV

SEQ ID NO: 429 - protein, 11 aa, Artificial Sequence
  Description of Artificial Sequence: Synthetic peptide
  N-term Ac
  MOD_RES (2)..(2): Alpha-Me R8-octenyl-alanine olefin amino acids connected by an all-carbon i to i+7 crosslinker comprising one double bond
  MOD_RES (7)..(7): Aminocyclopropane carboxylic acid residue
  MOD_RES (9)..(9): Alpha-Me S5-pentenyl-alanine olefin amino acids connected by an all-carbon i to i+4 crosslinker comprising one double bond
  C-term NH2
  Crosslinked Sequence
FAAYWEXLAAF

SEQ ID NO: 430 - protein, 11 aa, Artificial Sequence
  Description of Artificial Sequence: Synthetic peptide
  N-term Ac
  MOD_RES (2)..(2): Alpha-Me R8-octenyl-alanine olefin amino acids connected by an all-carbon i to i+7 crosslinker comprising one double bond
  MOD_RES (7)..(7): Aminocyclopropane carboxylic acid residue
  MOD_RES (9)..(9): Alpha-Me S5-pentenyl-alanine olefin amino acids connected by an all-carbon i to i+4 crosslinker comprising one double bond
  C-term NH2
  Crosslinked Sequence
FAAYWEXLAAW

SEQ ID NO: 431 - protein, 11 aa, Artificial Sequence
  Description of Artificial Sequence: Synthetic peptide
  N-term Ac
  MOD_RES (2)..(2): Alpha-Me R8-octenyl-alanine olefin amino acids connected by an all-carbon i to i+7 crosslinker comprising one double bond
  MOD_RES (7)..(7): Aminocyclopropane carboxylic acid residue
  MOD_RES (9)..(9): Alpha-Me S5-pentenyl-alanine olefin amino acids connected by an all-carbon i to i+4 crosslinker comprising one double bond
  C-term NH2
  Crosslinked Sequence
FAAYWEXLAAR

SEQ ID NO: 432 - protein, 11 aa, Artificial Sequence
  Description of Artificial Sequence: Synthetic peptide
  N-term Ac
  MOD_RES (2)..(2): Alpha-Me R8-octenyl-alanine olefin amino acids connected by an all-carbon i to i+7 crosslinker comprising one double bond
  MOD_RES (7)..(7): Aminocyclopropane carboxylic acid residue
  MOD_RES (9)..(9): Alpha-Me S5-pentenyl-alanine olefin amino acids connected by an all-carbon i to i+4 crosslinker comprising one double bond
  C-term NH2
  Crosslinked Sequence
FAAYWEXLAAK

SEQ ID NO: 433 - protein, 11 aa, Artificial Sequence
  Description of Artificial Sequence: Synthetic peptide
  N-term Ac
  MOD_RES (2)..(2): Alpha-Me R8-octenyl-alanine olefin amino acids connected by an all-carbon i to i+7 crosslinker comprising one double bond
  MOD_RES (7)..(7): Aminocyclopropane carboxylic acid residue
  MOD_RES (9)..(9): Alpha-Me S5-pentenyl-alanine olefin amino acids connected by an all-carbon i to i+4 crosslinker comprising one double bond
  C-term NH2
  Crosslinked Sequence
FAAYWEXLAAH

SEQ ID NO: 434 - protein, 12 aa, Artificial Sequence
  Description of Artificial Sequence: Synthetic peptide
  N-term Ac
  MOD_RES (3)..(3): Phe-2NO2
  MOD_RES (4)..(4): Alpha-Me R8-octenyl-alanine olefin amino acids connected by an all-carbon i to i+7 crosslinker comprising one double bond
  MOD_RES (11)..(11): Alpha-Me S5-pentenyl-alanine olefin amino acids connected by an all-carbon i to i+4 crosslinker comprising one double bond
  C-term NH2
  Crosslinked Sequence
LTFAHYWAQLAS

SEQ ID NO: 435 - protein, 12 aa, Artificial Sequence
  Description of Artificial Sequence: Synthetic peptide
  N-term Ac
  MOD_RES (4)..(4): Alpha-Me R8-octenyl-alanine olefin amino acids connected by an all-carbon i to i+7 crosslinker comprising one double bond
  MOD_RES (11)..(11): Alpha-Me S5-pentenyl-alanine olefin amino acids connected by an all-carbon i to i+4 crosslinker comprising one double bond
  C-term NH2
  Crosslinked Sequence
LTAAHYAAQLAS

SEQ ID NO: 436 - protein, 12 aa, Artificial Sequence
  Description of Artificial Sequence: Synthetic peptide
  N-term Ac
  MOD_RES (4)..(4): Alpha-Me R8-octenyl-alanine olefin amino acids connected by an all-carbon i to i+7 crosslinker comprising one double bond
  MOD_RES (11)..(11): Alpha-Me S5-pentenyl-alanine olefin amino acids connected by an all-carbon i to i+4 crosslinker comprising one double bond
  C-term NH2
  Crosslinked Sequence
LTFAHYAAQLAS

SEQ ID NO: 437 - protein, 16 aa, Artificial Sequence
  Description of Artificial Sequence: Synthetic peptide
  N-term Ac
  MOD_RES (7)..(7): Alpha-Me R8-octenyl-alanine olefin amino acids connected by an all-carbon i to i+7 crosslinker comprising one double bond
  MOD_RES (14)..(14): Alpha-Me S5-pentenyl-alanine olefin amino acids connected by an all-carbon i to i+4 crosslinker comprising one double bond
  C-term NH2
  Crosslinked Sequence
QSQQTFANLWALLAAN

SEQ ID NO: 438 - protein, 16 aa, Artificial Sequence
  Description of Artificial Sequence: Synthetic peptide
  N-term Ac
  MOD_RES (2)..(2): 2-aminoisobutyric acid
  MOD_RES (7)..(7): Alpha-Me R8-octenyl-alanine olefin amino acids connected by an all-carbon i to i+7 crosslinker comprising one double bond
  MOD_RES (14)..(14): Alpha-Me S5-pentenyl-alanine olefin amino acids connected by an all-carbon i to i+4 crosslinker comprising one double bond
  C-term NH2
  Crosslinked Sequence
QXQQTFANLWALLAAN

SEQ ID NO: 439 - protein, 16 aa, Artificial Sequence
  Description of Artificial Sequence: Synthetic peptide
  N-term Ac
  MOD_RES (2)..(2): 2-aminoisobutyric acid
  MOD_RES (7)..(7): Alpha-Me R8-octenyl-alanine olefin amino acids connected by an all-carbon i to i+7 crosslinker comprising one double bond
  MOD_RES (14)..(14): Alpha-Me S5-pentenyl-alanine olefin amino acids connected by an all-carbon i to i+4 crosslinker comprising one double bond
  C-term NH2
  Crosslinked Sequence
QXQQTFAALWALLAAN

SEQ ID NO: 440 - protein, 16 aa, Artificial Sequence
  Description of Artificial Sequence: Synthetic peptide
  N-term Ac
  MOD_RES (7)..(7): Alpha-Me R8-octenyl-alanine olefin amino acids connected by an all-carbon i to i+7 crosslinker comprising one double bond
  MOD_RES (14)..(14): Alpha-Me S5-pentenyl-alanine olefin amino acids connected by an all-carbon i to i+4 crosslinker comprising one double bond
  C-term NH2
  Crosslinked Sequence
AAAATFAAAWAALAAA

SEQ ID NO: 441 - protein, 10 aa, Artificial Sequence
  Description of Artificial Sequence: Synthetic peptide
  N-term Ac
  MOD_RES (2)..(2): Alpha-Me R8-octenyl-alanine olefin amino acids connected by an all-carbon i to i+7 crosslinker comprising one double bond
  MOD_RES (9)..(9): Alpha-Me S5-pentenyl-alanine olefin amino acids connected by an all-carbon i to i+4 crosslinker comprising one double bond
  C-term NH2
  Crosslinked Sequence
FAAAWRALAQ

SEQ ID NO: 442 - protein, 11 aa, Artificial Sequence
  Description of Artificial Sequence: Synthetic peptide
  N-term Ac
  MOD_RES (3)..(3): Alpha-Me R8-octenyl-alanine olefin amino acids connected by an all-carbon i to i+7 crosslinker comprising one double bond
  MOD_RES (10)..(10): Alpha-Me S5-pentenyl-alanine olefin amino acids connected by an all-carbon i to i+4 crosslinker comprising one double bond
  C-term NH2
  Crosslinked Sequence
TFAAAWAALAQ

SEQ ID NO: 443 - protein, 11 aa, Artificial Sequence
  Description of Artificial Sequence: Synthetic peptide
  N-term Ac
  MOD_RES (3)..(3): Alpha-Me R8-octenyl-alanine olefin amino acids connected by an all-carbon i to i+7 crosslinker comprising one double bond
  MOD_RES (10)..(10): Alpha-Me S5-pentenyl-alanine olefin amino acids connected by an all-carbon i to i+4 crosslinker comprising one double bond
  C-term NH2
  Crosslinked Sequence
TFAAAWRALAA

SEQ ID NO: 444 - protein, 11 aa, Artificial Sequence
  Description of Artificial Sequence: Synthetic peptide
  N-term Ac
  MOD_RES (3)..(3): Alpha-Me R8-octenyl-alanine olefin amino acids connected by an all-carbon i to i+7 crosslinker comprising one double bond
  MOD_RES (10)..(10): Alpha-Me S5-pentenyl-alanine olefin amino acids connected by an all-carbon i to i+4 crosslinker comprising one double bond
  C-term NH2
  Crosslinked Sequence
VFAAAWRALAQ

SEQ ID NO: 445 - protein, 11 aa, Artificial Sequence
  Description of Artificial Sequence: Synthetic peptide
  N-term Ac
  MOD_RES (3)..(3): Alpha-Me R8-octenyl-alanine olefin amino acids connected by an all-carbon i to i+7 crosslinker comprising one double bond
  MOD_RES (10)..(10): Alpha-Me S5-pentenyl-alanine olefin amino acids connected by an all-carbon i to i+4 crosslinker comprising one double bond
  C-term NH2
  Crosslinked Sequence
AFAAAWAALAA

SEQ ID NO: 446 - protein, 11 aa, Artificial Sequence
  Description of Artificial Sequence: Synthetic peptide
  N-term Ac
  MOD_RES (3)..(3): Alpha-Me R8-octenyl-alanine olefin amino acids connected by an all-carbon i to i+7 crosslinker comprising one double bond
  MOD_RES (10)..(10): Alpha-Me S5-pentenyl-alanine olefin amino acids connected by an all-carbon i to i+4 crosslinker comprising one double bond
  C-term NH2
  Crosslinked Sequence
TFAAAWKALAQ

SEQ ID NO: 447 - protein, 11 aa, Artificial Sequence
  Description of Artificial Sequence: Synthetic peptide
  N-term Ac
  MOD_RES (3)..(3): Alpha-Me R8-octenyl-alanine olefin amino acids connected by an all-carbon i to i+7 crosslinker comprising one double bond
  MOD_RES (7)..(7): Ornithine
  MOD_RES (10)..(10): Alpha-Me S5-pentenyl-alanine olefin amino acids connected by an all-carbon i to i+4 crosslinker comprising one double bond
  C-term NH2
  Crosslinked Sequence
TFAAAWXALAQ

SEQ ID NO: 448 - protein, 11 aa, Artificial Sequence
  Description of Artificial Sequence: Synthetic peptide
  N-term Ac
  MOD_RES (3)..(3): Alpha-Me R8-octenyl-alanine olefin amino acids connected by an all-carbon i to i+7 crosslinker comprising one double bond
  MOD_RES (10)..(10): Alpha-Me S5-pentenyl-alanine olefin amino acids connected by an all-carbon i to i+4 crosslinker comprising one double bond
  C-term NH2
  Crosslinked Sequence
TFAAAWSALAQ

SEQ ID NO: 449 - protein, 12 aa, Artificial Sequence
  Description of Artificial Sequence: Synthetic peptide
  N-term Ac
  MOD_RES (4)..(4): Alpha-Me R8-octenyl-alanine olefin amino acids connected by an all-carbon i to i+7 crosslinker comprising one double bond
  MOD_RES (11)..(11): Alpha-Me S5-pentenyl-alanine olefin amino acids connected by an all-carbon i to i+4 crosslinker comprising one double bond
  C-term NH2
  Crosslinked Sequence
LTFAAAWRALAQ

SEQ ID NO: 450 - protein, 10 aa, Artificial Sequence
  Description of Artificial Sequence: Synthetic peptide
  N-term Ac
  MOD_RES (2)..(2): Alpha-Me R8-octenyl-alanine olefin amino acids connected by an all-carbon i to i+7 crosslinker comprising one double bond
  MOD_RES (9)..(9): Alpha-Me S5-pentenyl-alanine olefin amino acids connected by an all-carbon i to i+4 crosslinker comprising one double bond
  C-term NH2
  Crosslinked Sequence
FAAYWAQLAA

SEQ ID NO: 451 - protein, 10 aa, Artificial Sequence
  Description of Artificial Sequence: Synthetic peptide
  N-term Ac
  MOD_RES (2)..(2): Alpha-Me R8-octenyl-alanine olefin amino acids connected by an all-carbon i to i+7 crosslinker comprising one double bond
  MOD_RES (9)..(9): Alpha-Me S5-pentenyl-alanine olefin amino acids connected by an all-carbon i to i+4 crosslinker comprising one double bond
  C-term NH2
  Crosslinked Sequence
FAAWWAALAA

SEQ ID NO: 452 - protein, 10 aa, Artificial Sequence
  Description of Artificial Sequence: Synthetic peptide
  N-term Ac
  MOD_RES (2)..(2): Alpha-Me R8-octenyl-alanine olefin amino acids connected by an all-carbon i to i+7 crosslinker comprising one double bond
  MOD_RES (9)..(9): Alpha-Me S5-pentenyl-alanine olefin amino acids connected by an all-carbon i to i+4 crosslinker comprising one double bond
  C-term NH2
  Crosslinked Sequence
FAAWWAQLAA

SEQ ID NO: 453 - protein, 9 aa, Artificial Sequence
  Description of Artificial Sequence: Synthetic peptide
  N-term Ac
  MOD_RES (2)..(2): Alpha-Me R8-octenyl-alanine olefin amino acids connected by an all-carbon i to i+7 crosslinker comprising one double bond
  MOD_RES (9)..(9): Alpha-Me S5-pentenyl-alanine olefin amino acids connected by an all-carbon i to i+4 crosslinker comprising one double bond
  C-term NH2
  Crosslinked Sequence
FAAYWEALA

SEQ ID NO: 454 - protein, 9 aa, Artificial Sequence
  Description of Artificial Sequence: Synthetic peptide
  N-term Ac
  MOD_RES (2)..(2): Alpha-Me R8-octenyl-alanine olefin amino acids connected by an all-carbon i to i+7 crosslinker comprising one double bond
  MOD_RES (9)..(9): Alpha-Me S5-pentenyl-alanine olefin amino acids connected by an all-carbon i to i+4 crosslinker comprising one double bond
  C-term NH2
  Crosslinked Sequence
FAAYWAALA

SEQ ID NO: 455 - protein, 9 aa, Artificial Sequence
  Description of Artificial Sequence: Synthetic peptide
  N-term Ac
  MOD_RES (2)..(2): Alpha-Me R8-octenyl-alanine olefin amino acids connected by an all-carbon i to i+7 crosslinker comprising one double bond
  MOD_RES (9)..(9): Alpha-Me S5-pentenyl-alanine olefin amino acids connected by an all-carbon i to i+4 crosslinker comprising one double bond
  C-term NH2
  Crosslinked Sequence
FAAYWKALA

SEQ ID NO: 456 - protein, 9 aa, Artificial Sequence
  Description of Artificial Sequence: Synthetic peptide
  N-term Ac
  MOD_RES (2)..(2): Alpha-Me R8-octenyl-alanine olefin amino acids connected by an all-carbon i to i+7 crosslinker comprising one double bond
  MOD_RES (6)..(6): Ornithine
  MOD_RES (9)..(9): Alpha-Me S5-pentenyl-alanine olefin amino acids connected by an all-carbon i to i+4 crosslinker comprising one double bond
  C-term NH2
  Crosslinked Sequence
FAAYWXALA

SEQ ID NO: 457 - protein, 9 aa, Artificial Sequence
  Description of Artificial Sequence: Synthetic peptide
  N-term Ac
  MOD_RES (2)..(2): Alpha-Me R8-octenyl-alanine olefin amino acids connected by an all-carbon i to i+7 crosslinker comprising one double bond
  MOD_RES (9)..(9): Alpha-Me S5-pentenyl-alanine olefin amino acids connected by an all-carbon i to i+4 crosslinker comprising one double bond
  C-term NH2
  Crosslinked Sequence
FAAYWQALA

SEQ ID NO: 458 - protein, 9 aa, Artificial Sequence
  Description of Artificial Sequence: Synthetic peptide
  N-term Ac
  MOD_RES (2)..(2): Alpha-Me R8-octenyl-alanine olefin amino acids connected by an all-carbon i to i+7 crosslinker comprising one double bond
  MOD_RES (9)..(9): Alpha-Me S5-pentenyl-alanine olefin amino acids connected by an all-carbon i to i+4 crosslinker comprising one double bond
  C-term NH2
  Crosslinked Sequence
FAAYWAQLA

SEQ ID NO: 459 - protein, 10 aa, Artificial Sequence
  Description of Artificial Sequence: Synthetic peptide
  N-term Ac
  MOD_RES (2)..(2): Alpha-Me R8-octenyl-alanine olefin amino acids connected by an all-carbon i to i+7 crosslinker comprising one double bond
  MOD_RES (9)..(9): Alpha-Me S5-pentenyl-alanine olefin amino acids connected by an all-carbon i to i+4 crosslinker comprising one double bond
  C-term NH2
  Crosslinked Sequence
FAHYWDQLAS

SEQ ID NO: 460 - protein, 10 aa, Artificial Sequence
  Description of Artificial Sequence: Synthetic peptide
  N-term Ac
  MOD_RES (2)..(2): Alpha-Me R8-octenyl-alanine olefin amino acids connected by an all-carbon i to i+7 crosslinker comprising one double bond
  MOD_RES (9)..(9): Alpha-Me S5-pentenyl-alanine olefin amino acids connected by an all-carbon i to i+4 crosslinker comprising one double bond
  C-term NH2
  Crosslinked Sequence
FAHFWEQLAS

SEQ ID NO: 461 - protein, 10 aa, Artificial Sequence
  Description of Artificial Sequence: Synthetic peptide
  N-term Ac
  MOD_RES (2)..(2): Alpha-Me R8-octenyl-alanine olefin amino acids connected by an all-carbon i to i+7 crosslinker comprising one double bond
  MOD_RES (9)..(9): Alpha-Me S5-pentenyl-alanine olefin amino acids connected by an all-carbon i to i+4 crosslinker comprising one double bond
  C-term NH2
  Crosslinked Sequence
FAAYWHQLAS

SEQ ID NO: 462 - protein, 10 aa, Artificial Sequence
  Description of Artificial Sequence: Synthetic peptide
  N-term Ac
  MOD_RES (2)..(2): Alpha-Me R8-octenyl-alanine olefin amino acids connected by an all-carbon i to i+7 crosslinker comprising one double bond
  MOD_RES (9)..(9): Alpha-Me S5-pentenyl-alanine olefin amino acids connected by an all-carbon i to i+4 crosslinker comprising one double bond
  C-term NH2
  Crosslinked Sequence
FAAYWKQLAS

SEQ ID NO: 463 - protein, 10 aa, Artificial Sequence
  Description of Artificial Sequence: Synthetic peptide
  N-term Ac
  MOD_RES (2)..(2): Alpha-Me R8-octenyl-alanine olefin amino acids connected by an all-carbon i to i+7 crosslinker comprising one double bond
  MOD_RES (6)..(6): Ornithine
  MOD_RES (9)..(9): Alpha-Me S5-pentenyl-alanine olefin amino acids connected by an all-carbon i to i+4 crosslinker comprising one double bond
  C-term NH2
  Crosslinked Sequence
FAAYWXQLAS

SEQ ID NO: 464 - protein, 10 aa, Artificial Sequence
  Description of Artificial Sequence: Synthetic peptide
  N-term Ac
  MOD_RES (2)..(2): Alpha-Me R8-octenyl-alanine olefin amino acids connected by an all-carbon i to i+7 crosslinker comprising one double bond
  MOD_RES (9)..(9): Alpha-Me S5-pentenyl-alanine olefin amino acids connected by an all-carbon i to i+4 crosslinker comprising one double bond
  C-term NH2
  Crosslinked Sequence
FAHYWSQLAS

SEQ ID NO: 465 - protein, 10 aa, Artificial Sequence
  Description of Artificial Sequence: Synthetic peptide
  N-term Ac
  MOD_RES (2)..(2): Alpha-Me R8-octenyl-alanine olefin amino acids connected by an all-carbon i to i+7 crosslinker comprising one double bond
  MOD_RES (9)..(9): Alpha-Me S5-pentenyl-alanine olefin amino acids connected by an all-carbon i to i+4 crosslinker comprising one double bond
  C-term NH2
  Crosslinked Sequence
FAHWWEQLAS

SEQ ID NO: 466 - protein, 10 aa, Artificial Sequence
  Description of Artificial Sequence: Synthetic peptide
  N-term Ac
  MOD_RES (2)..(2): Alpha-Me R8-octenyl-alanine olefin amino acids connected by an all-carbon i to i+7 crosslinker comprising one double bond
  MOD_RES (9)..(9): Alpha-Me S5-pentenyl-alanine olefin amino acids connected by an all-carbon i to i+4 crosslinker comprising one double bond
  C-term NH2
  Crosslinked Sequence
FAHWWAQLAS

SEQ ID NO: 467 - protein, 10 aa, Artificial Sequence
  Description of Artificial Sequence: Synthetic peptide
  N-term Ac
  MOD_RES (2)..(2): Alpha-Me R8-octenyl-alanine olefin amino acids connected by an all-carbon i to i+7 crosslinker comprising one double bond
  MOD_RES (9)..(9): Alpha-Me S5-pentenyl-alanine olefin amino acids connected by an all-carbon i to i+4 crosslinker comprising one double bond
  C-term NH2
  Crosslinked Sequence
FAAWWHQLAS

SEQ ID NO: 468 - protein, 10 aa, Artificial Sequence
  Description of Artificial Sequence: Synthetic peptide
  N-term Ac
  MOD_RES (2)..(2): Alpha-Me R8-octenyl-alanine olefin amino acids connected by an all-carbon i to i+7 crosslinker comprising one double bond
  MOD_RES (9)..(9): Alpha-Me S5-pentenyl-alanine olefin amino acids connected by an all-carbon i to i+4 crosslinker comprising one double bond
  C-term NH2
  Crosslinked Sequence
FAAWWKQLAS

SEQ ID NO: 469 - protein, 10 aa, Artificial Sequence
  Description of Artificial Sequence: Synthetic peptide
  N-term Ac
  MOD_RES (2)..(2): Alpha-Me R8-octenyl-alanine olefin amino acids connected by an all-carbon i to i+7 crosslinker comprising one double bond
  MOD_RES (6)..(6): Ornithine
  MOD_RES (9)..(9): Alpha-Me S5-pentenyl-alanine olefin amino acids connected by an all-carbon i to i+4 crosslinker comprising one double bond
  C-term NH2
  Crosslinked Sequence
FAAWWXQLAS

SEQ ID NO: 470 - protein, 10 aa, Artificial Sequence
  Description of Artificial Sequence: Synthetic peptide
  N-term Ac
  MOD_RES (2)..(2): Alpha-Me R8-octenyl-alanine olefin amino acids connected by an all-carbon i to i+7 crosslinker comprising one double bond
  MOD_RES (9)..(9): Alpha-Me S5-pentenyl-alanine olefin amino acids connected by an all-carbon i to i+4 crosslinker comprising one double bond
  C-term NH2
  Crosslinked Sequence
FAHWWSQLAS

SEQ ID NO: 471 - protein, 12 aa, Artificial Sequence
  Description of Artificial Sequence: Synthetic peptide
  N-term Ac
  MOD_RES (4)..(4): Alpha-Me R8-octenyl-alanine olefin amino acids connected by an all-carbon i to i+7 crosslinker comprising one double bond
  MOD_RES (9)..(9): Norleucine
  MOD_RES (11)..(11): Alpha-Me S5-pentenyl-alanine olefin amino acids connected by an all-carbon i to i+4 crosslinker comprising one double bond
  C-term NH2
  Crosslinked Sequence
LTFANYWALLAQ

SEQ ID NO: 472 - protein, 12 aa, Artificial Sequence
  Description of Artificial Sequence: Synthetic peptide
  N-term Ac
  MOD_RES (4)..(4): Alpha-Me R8-octenyl-alanine olefin amino acids connected by an all-carbon i to i+7 crosslinker comprising one double bond
  MOD_RES (11)..(11): Alpha-Me S5-pentenyl-alanine olefin amino acids connected by an all-carbon i to i+4 crosslinker comprising one double bond
  C-term NH2
  Crosslinked Sequence
LTFANLWAQLAQ

SEQ ID NO: 473 - protein, 12 aa, Artificial Sequence
  Description of Artificial Sequence: Synthetic peptide
  N-term Ac
  MOD_RES (4)..(4): Alpha-Me R8-octenyl-alanine olefin amino acids connected by an all-carbon i to i+7 crosslinker comprising one double bond
  MOD_RES (9)..(9): Norleucine
  MOD_RES (11)..(11): Alpha-Me S5-pentenyl-alanine olefin amino acids connected by an all-carbon i to i+4 crosslinker comprising one double bond
  C-term NH2
  Crosslinked Sequence
LTFANYWALLAA

SEQ ID NO: 474 - protein, 12 aa, Artificial Sequence
  Description of Artificial Sequence: Synthetic peptide
  N-term Ac
  MOD_RES (4)..(4): Alpha-Me R8-octenyl-alanine olefin amino acids connected by an all-carbon i to i+7 crosslinker comprising one double bond
  MOD_RES (11)..(11): Alpha-Me S5-pentenyl-alanine olefin amino acids connected by an all-carbon i to i+4 crosslinker comprising one double bond
  C-term NH2
  Crosslinked Sequence
LTFANLWAQLAA

SEQ ID NO: 475 - protein, 12 aa, Artificial Sequence
  Description of Artificial Sequence: Synthetic peptide
  N-term Ac
  MOD_RES (4)..(4): Alpha-Me R8-octenyl-alanine olefin amino acids connected by an all-carbon i to i+7 crosslinker comprising one double bond
  MOD_RES (9)..(9): Norleucine
  MOD_RES (11)..(11): Alpha-Me S5-pentenyl-alanine olefin amino acids connected by an all-carbon i to i+4 crosslinker comprising one double bond
  C-term NH2
  Crosslinked Sequence
LTFAAYWALLAQ

SEQ ID NO: 476 - protein, 12 aa, Artificial Sequence
  Description of Artificial Sequence: Synthetic peptide
  N-term Ac
  MOD_RES (4)..(4): Alpha-Me R8-octenyl-alanine olefin amino acids connected by an all-carbon i to i+7 crosslinker comprising one double bond
  MOD_RES (11)..(11): Alpha-Me S5-pentenyl-alanine olefin amino acids connected by an all-carbon i to i+4 crosslinker comprising one double bond
  C-term NH2
  Crosslinked Sequence
LTFAALWAQLAQ

SEQ ID NO: 477 - protein, 12 aa, Artificial Sequence
  Description of Artificial Sequence: Synthetic peptide
  N-term Ac
  MOD_RES (4)..(4): Alpha-Me R8-octenyl-alanine olefin amino acids connected by an all-carbon i to i+7 crosslinker comprising one double bond
  MOD_RES (9)..(9): Norleucine
  MOD_RES (11)..(11): Alpha-Me S5-pentenyl-alanine olefin amino acids connected by an all-carbon i to i+4 crosslinker comprising one double bond
  C-term NH2
  Crosslinked Sequence
LAFANYWALLAQ

SEQ ID NO: 478 - protein, 12 aa, Artificial Sequence
  Description of Artificial Sequence: Synthetic peptide
  N-term Ac
  MOD_RES (4)..(4): Alpha-Me R8-octenyl-alanine olefin amino acids connected by an all-carbon i to i+7 crosslinker comprising one double bond
  MOD_RES (11)..(11): Alpha-Me S5-pentenyl-alanine olefin amino acids connected by an all-carbon i to i+4 crosslinker comprising one double bond
  C-term NH2
  Crosslinked Sequence
LAFANLWAQLAQ

SEQ ID NO: 479 - protein, 12 aa, Artificial Sequence
  Description of Artificial Sequence: Synthetic peptide
  N-term Ac
  MOD_RES (4)..(4): Alpha-Me R8-octenyl-alanine olefin amino acids connected by an all-carbon i to i+7 crosslinker comprising one double bond
  MOD_RES (9)..(9): Norleucine
  MOD_RES (11)..(11): Alpha-Me S5-pentenyl-alanine olefin amino acids connected by an all-carbon i to i+4 crosslinker comprising one double bond
  C-term NH2
  Crosslinked Sequence
LAFAAYWALLAA

SEQ ID NO: 480 - protein, 12 aa, Artificial Sequence
  Description of Artificial Sequence: Synthetic peptide
  N-term Ac
  MOD_RES (4)..(4): Alpha-Me R8-octenyl-alanine olefin amino acids connected by an all-carbon i to i+7 crosslinker comprising one double bond
  MOD_RES (11)..(11): Alpha-Me S5-pentenyl-alanine olefin amino acids connected by an all-carbon i to i+4 crosslinker comprising one double bond
  C-term NH2
  Crosslinked Sequence
LAFAALWAQLAA

SEQ ID NO: 481 - protein, 12 aa, Artificial Sequence
  Description of Artificial Sequence: Synthetic peptide
  N-term Ac
  MOD_RES (4)..(4): Alpha-Me R8-octenyl-alanine olefin amino acids connected by an all-carbon i to i+7 crosslinker comprising one double bond
  MOD_RES (11)..(11): Alpha-Me S5-pentenyl-alanine olefin amino acids connected by an all-carbon i to i+4 crosslinker comprising one double bond
  C-term NH2
  Crosslinked Sequence
LAFAAYWAALAA

SEQ ID NO: 482 - protein, 11 aa, Artificial Sequence
  Description of Artificial Sequence: Synthetic peptide
  N-term Ac
  MOD_RES (2)..(2): Alpha-Me R8-octenyl-alanine olefin amino acids connected by an all-carbon i to i+7 crosslinker comprising one double bond
  MOD_RES (7)..(7): Aminocyclopropane carboxylic acid residue
  MOD_RES (9)..(9): Alpha-Me S5-pentenyl-alanine olefin amino acids connected by an all-carbon i to i+4 crosslinker comprising one double bond
  MOD_RES (11)..(11): 2-aminoisobutyric acid
  C-term NH2
  Crosslinked Sequence
FAAYWEXLAAX

SEQ ID NO: 483 - protein, 11 aa, Artificial Sequence
  Description of Artificial Sequence: Synthetic peptide
  N-term Ac
  MOD_RES (2)..(2): Alpha-Me R8-octenyl-alanine olefin amino acids connected by an all-carbon i to i+7 crosslinker comprising one double bond
  MOD_RES (9)..(9): Alpha-Me S5-pentenyl-alanine olefin amino acids connected by an all-carbon i to i+4 crosslinker comprising one double bond
  C-term NH2
  Crosslinked Sequence
FAAYWAQLAAA

SEQ ID NO: 484 - protein, 11 aa, Artificial Sequence
  Description of Artificial Sequence: Synthetic peptide
  N-term Ac
  MOD_RES (2)..(2): Alpha-Me R8-octenyl-alanine olefin amino acids connected by an all-carbon i to i+7 crosslinker comprising one double bond
  MOD_RES (7)..(7): Aminocyclopropane carboxylic acid residue
  MOD_RES (9)..(9): Alpha-Me S5-pentenyl-alanine olefin amino acids connected by an all-carbon i to i+4 crosslinker comprising one double bond
  C-term NH2
  Crosslinked Sequence
FAAYWAXLAAA

SEQ ID NO: 485 - protein, 11 aa, Artificial Sequence
  Description of Artificial Sequence: Synthetic peptide
  N-term Ac
  MOD_RES (2)..(2): Alpha-Me R8-octenyl-alanine olefin amino acids connected by an all-carbon i to i+7 crosslinker comprising one double bond
  MOD_RES (7)..(7): Aminocyclopropane carboxylic acid residue
  MOD_RES (9)..(9): Alpha-Me S5-pentenyl-alanine olefin amino acids connected by an all-carbon i to i+4 crosslinker comprising one double bond
  C-term NH2
  Crosslinked Sequence
FAAYWSXLAAA

SEQ ID NO: 486 - protein, 11 aa, Artificial Sequence
  Description of Artificial Sequence: Synthetic peptide
  N-term Ac
  MOD_RES (2)..(2): Alpha-Me R8-octenyl-alanine olefin amino acids connected by an all-carbon i to i+7 crosslinker comprising one double bond
  MOD_RES (7)..(7): Aminocyclopropane carboxylic acid residue
  MOD_RES (9)..(9): Alpha-Me S5-pentenyl-alanine olefin amino acids connected by an all-carbon i to i+4 crosslinker comprising one double bond
  C-term NH2
  Crosslinked Sequence
FAAYWEXLAAS

SEQ ID NO: 487 - protein, 11 aa, Artificial Sequence
  Description of Artificial Sequence: Synthetic peptide
  N-term Ac
  MOD_RES (2)..(2): Alpha-Me R8-octenyl-alanine olefin amino acids connected by an all-carbon i to i+7 crosslinker comprising one double bond
  MOD_RES (7)..(7): Aminocyclopropane carboxylic acid residue
  MOD_RES (9)..(9): Alpha-Me S5-pentenyl-alanine olefin amino acids connected by an all-carbon i to i+4 crosslinker comprising one double bond
  C-term NH2
  Crosslinked Sequence
FAAYWEXLAAT

SEQ ID NO: 488 - protein, 11 aa, Artificial Sequence
  Description of Artificial Sequence: Synthetic peptide
  N-term Ac
  MOD_RES (2)..(2): Alpha-Me R8-octenyl-alanine olefin amino acids connected by an all-carbon i to i+7 crosslinker comprising one double bond
  MOD_RES (7)..(7): Aminocyclopropane carboxylic acid residue
  MOD_RES (9)..(9): Alpha-Me S5-pentenyl-alanine olefin amino acids connected by an all-carbon i to i+4 crosslinker comprising one double bond
  C-term NH2
  Crosslinked Sequence
FAAYWEXLAAL

SEQ ID NO: 489 - protein, 11 aa, Artificial Sequence
  Description of Artificial Sequence: Synthetic peptide
  N-term Ac
  MOD_RES (2)..(2): Alpha-Me R8-octenyl-alanine olefin amino acids connected by an all-carbon i to i+7 crosslinker comprising one double bond
  MOD_RES (7)..(7): Aminocyclopropane carboxylic acid residue
  MOD_RES (9)..(9): Alpha-Me S5-pentenyl-alanine olefin amino acids connected by an all-carbon i to i+4 crosslinker comprising one double bond
  C-term NH2
  Crosslinked Sequence
FAAYWEXLAAQ

SEQ ID NO: 490 - protein, 11 aa, Artificial Sequence
  Description of Artificial Sequence: Synthetic peptide
  N-term Ac
  MOD_RES (2)..(2): Alpha-Me R8-octenyl-alanine olefin amino acids connected by an all-carbon i to i+7 crosslinker comprising one double bond
  MOD_RES (7)..(7): Aminocyclopropane carboxylic acid residue
  MOD_RES (9)..(9): Alpha-Me S5-pentenyl-alanine olefin amino acids connected by an all-carbon i to i+4 crosslinker comprising one double bond
  C-term NH2
  Crosslinked Sequence
FAAFWEXLAAA

SEQ ID NO: 491 - protein, 11 aa, Artificial Sequence
  Description of Artificial Sequence: Synthetic peptide
  N-term Ac
  MOD_RES (2)..(2): Alpha-Me R8-octenyl-alanine olefin amino acids connected by an all-carbon i to i+7 crosslinker comprising one double bond
  MOD_RES (7)..(7): Aminocyclopropane carboxylic acid residue
  MOD_RES (9)..(9): Alpha-Me S5-pentenyl-alanine olefin amino acids connected by an all-carbon i to i+4 crosslinker comprising one double bond
  C-term NH2
  Crosslinked Sequence
FAAWWEXLAAA

SEQ ID NO: 492 - protein, 11 aa, Artificial Sequence
  Description of Artificial Sequence: Synthetic peptide
  N-term Ac
  MOD_RES (2)..(2): Alpha-Me R8-octenyl-alanine olefin amino acids connected by an all-carbon i to i+7 crosslinker comprising one double bond
  MOD_RES (7)..(7): Aminocyclopropane carboxylic acid residue
  MOD_RES (9)..(9): Alpha-Me S5-pentenyl-alanine olefin amino acids connected by an all-carbon i to i+4 crosslinker comprising one double bond
  C-term NH2
  Crosslinked Sequence
FAAYWEXLASA

SEQ ID NO: 493 - protein, 11 aa, Artificial Sequence
  Description of Artificial Sequence: Synthetic peptide
  N-term Ac
  MOD_RES (2)..(2): Alpha-Me R8-octenyl-alanine olefin amino acids connected by an all-carbon i to i+7 crosslinker comprising one double bond
  MOD_RES (9)..(9): Alpha-Me S5-pentenyl-alanine olefin amino acids connected by an all-carbon i to i+4 crosslinker comprising one double bond
  C-term NH2
  Crosslinked Sequence
FAAYWEALAAA

SEQ ID NO: 494 - protein, 11 aa, Artificial Sequence
  Description of Artificial Sequence: Synthetic peptide
  N-term Ac
  MOD_RES (2)..(2): Alpha-Me R8-octenyl-alanine olefin amino acids connected by an all-carbon i to i+7 crosslinker comprising one double bond
  MOD_RES (7)..(7): Norleucine
  MOD_RES (9)..(9): Alpha-Me S5-pentenyl-alanine olefin amino acids connected by an all-carbon i to i+4 crosslinker comprising one double bond
  C-term NH2
  Crosslinked Sequence
FAAYWELLAAA

SEQ ID NO: 495 - protein, 11 aa, Artificial Sequence
  Description of Artificial Sequence: Synthetic peptide
  N-term Ac
  MOD_RES (2)..(2): Alpha-Me R8-octenyl-alanine olefin amino acids connected by an all-carbon i to i+7 crosslinker comprising one double bond
  MOD_RES (7)..(7): Aminocyclopropane carboxylic acid residue
  MOD_RES (9)..(9): Alpha-Me S5-pentenyl-alanine olefin amino acids connected by an all-carbon i to i+4 crosslinker comprising one double bond
  MOD_RES (10)..(10): Abu
  C-term NH2
  Crosslinked Sequence
FAAYWEXLAXA

SEQ ID NO: 496 - protein, 11 aa, Artificial Sequence
  Description of Artificial Sequence: Synthetic peptide
  N-term Ac
  MOD_RES (2)..(2): Alpha-Me R8-octenyl-alanine olefin amino acids connected by an all-carbon i to i+7 crosslinker comprising one double bond
  MOD_RES (7)..(7): Aminocyclopropane carboxylic acid residue
  MOD_RES (9)..(9): Alpha-Me S5-pentenyl-alanine olefin amino acids connected by an all-carbon i to i+4 crosslinker comprising one double bond
  MOD_RES (10)..(10): Norleucine
  C-term NH2
  Crosslinked Sequence
FAAYWEXLALA

SEQ ID NO: 497 - protein, 11 aa, Artificial Sequence
  Description of Artificial Sequence: Synthetic peptide
  N-term Ac
  MOD_RES (2)..(2): Alpha-Me R8-octenyl-alanine olefin amino acids connected by an all-carbon i to i+7 crosslinker comprising one double bond
  MOD_RES (7)..(7): 2-aminoisobutyric acid
  MOD_RES (9)..(9): Alpha-Me S5-pentenyl-alanine olefin amino acids connected by an all-carbon i to i+4 crosslinker comprising one double bond
  MOD_RES (10)..(10): Norleucine
  C-term NH2
  Crosslinked Sequence
FAAYWEXLALA

SEQ ID NO: 498 - protein, 11 aa, Artificial Sequence
  Description of Artificial Sequence: Synthetic peptide
  N-term Ac
  MOD_RES (2)..(2): Alpha-Me R8-octenyl-alanine olefin amino acids connected by an all-carbon i to i+7 crosslinker comprising one double bond
  MOD_RES (9)..(9): Alpha-Me S5-pentenyl-alanine olefin amino acids connected by an all-carbon i to i+4 crosslinker comprising one double bond
  MOD_RES (10)..(10): Norleucine
  C-term NH2
  Crosslinked Sequence
FAAYWEALALA

SEQ ID NO: 499 - protein, 11 aa, Artificial Sequence
  Description of Artificial Sequence: Synthetic peptide
  N-term Ac
  MOD_RES (2)..(2): Alpha-Me R8-octenyl-alanine olefin amino acids connected by an all-carbon i to i+7 crosslinker comprising one double bond
  MOD_RES (7)..(7): Norleucine
  MOD_RES (9)..(9): Alpha-Me S5-pentenyl-alanine olefin amino acids connected by an all-carbon i to i+4 crosslinker comprising one double bond
  MOD_RES (10)..(10): Norleucine
  C-term NH2
  Crosslinked Sequence
FAAYWELLALA

SEQ ID NO: 500 - protein, 10 aa, Artificial Sequence
  Description of Artificial Sequence: Synthetic peptide
  N-term Ac
  MOD_RES (2)..(2): Alpha-Me R8-octenyl-alanine olefin amino acids connected by an all-carbon i to i+7 crosslinker comprising one double bond
  MOD_RES (7)..(7): 2-aminoisobutyric acid
  MOD_RES (9)..(9): Alpha-Me S5-pentenyl-alanine olefin amino acids connected by an all-carbon i to i+4 crosslinker comprising one double bond
  MOD_RES (10)..(10): Abu
  C-term NH2
  Crosslinked Sequence
FAAYWEXLAX

SEQ ID NO: 501 - protein, 10 aa, Artificial Sequence
  Description of Artificial Sequence: Synthetic peptide
  N-term Ac
  MOD_RES (2)..(2): Alpha-Me R8-octenyl-alanine olefin amino acids connected by an all-carbon i to i+7 crosslinker comprising one double bond
  MOD_RES (7)..(7): Norleucine
  MOD_RES (9)..(9): Alpha-Me S5-pentenyl-alanine olefin amino acids connected by an all-carbon i to i+4 crosslinker comprising one double bond
  MOD_RES (10)..(10): Abu
  C-term NH2
  Crosslinked Sequence
FAAYWELLAX

SEQ ID NO: 502 - protein, 10 aa, Artificial Sequence
  Description of Artificial Sequence: Synthetic peptide
  N-term Ac
  MOD_RES (2)..(2): Alpha-Me R8-octenyl-alanine olefin amino acids connected by an all-carbon i to i+7 crosslinker comprising one double bond
  MOD_RES (9)..(9): Alpha-Me S5-pentenyl-alanine olefin amino acids connected by an all-carbon i to i+4 crosslinker comprising one double bond
  MOD_RES (10)..(10): Abu
  C-term NH2
  Crosslinked Sequence
FAAYWEALAX

SEQ ID NO: 503 - protein, 12 aa, Artificial Sequence
  Description of Artificial Sequence: Synthetic peptide
  N-term Ac
  MOD_RES (4)..(4): Alpha-Me R8-octenyl-alanine olefin amino acids connected by an all-carbon i to i+7 crosslinker comprising one double bond
  MOD_RES (11)..(11): Alpha-Me S5-pentenyl-alanine olefin amino acids connected by an all-carbon i to i+4 crosslinker comprising one double bond
  C-term NH2
  Crosslinked Sequence
LTFAAFWAQLAS

SEQ ID NO: 504 - protein, 12 aa, Artificial Sequence
  Description of Artificial Sequence: Synthetic peptide
  N-term Ac
  MOD_RES (4)..(4): Alpha-Me R8-octenyl-alanine olefin amino acids connected by an all-carbon i to i+7 crosslinker comprising one double bond
  MOD_RES (11)..(11): Alpha-Me S5-pentenyl-alanine olefin amino acids connected by an all-carbon i to i+4 crosslinker comprising one double bond
  C-term NH2
  Crosslinked Sequence
LTFAAWWAQLAS

SEQ ID NO: 505 - protein, 12 aa, Artificial Sequence
  Description of Artificial Sequence: Synthetic peptide
  N-term Ac
  MOD_RES (4)..(4): Alpha-Me R8-octenyl-alanine olefin amino acids connected by an all-carbon i to i+7 crosslinker comprising one double bond
  MOD_RES (11)..(11): Alpha-Me S5-pentenyl-alanine olefin amino acids connected by an all-carbon i to i+4 crosslinker comprising one double bond
  C-term NH2
  Crosslinked Sequence
LTFAAYWAQIAS

SEQ ID NO: 506 - protein, 12 aa, Artificial Sequence
  Description of Artificial Sequence: Synthetic peptide
  N-term Ac
  MOD_RES (4)..(4): Alpha-Me R8-octenyl-alanine olefin amino acids connected by an all-carbon i to i+7 crosslinker comprising one double bond
  MOD_RES (10)..(10): Norleucine
  MOD_RES (11)..(11): Alpha-Me S5-pentenyl-alanine olefin amino acids connected by an all-carbon i to i+4 crosslinker comprising one double bond
  C-term NH2
  Crosslinked Sequence
LTFAAYWAQLAS

SEQ ID NO: 507 - protein, 13 aa, Artificial Sequence
  Description of Artificial Sequence: Synthetic peptide
  N-term Ac
  MOD_RES (4)..(4): Alpha-Me R8-octenyl-alanine olefin amino acids connected by an all-carbon i to i+7 crosslinker comprising one double bond
  MOD_RES (11)..(11): Alpha-Me S5-pentenyl-alanine olefin amino acids connected by an all-carbon i to i+4 crosslinker comprising one double bond
  C-term NH2
  Crosslinked Sequence
LTFAAYWAQLASA

SEQ ID NO: 508 - protein, 12 aa, Artificial Sequence
  Description of Artificial Sequence: Synthetic peptide
  N-term Ac
  MOD_RES (4)..(4): Alpha-Me R8-octenyl-alanine olefin amino acids connected by an all-carbon i to i+7 crosslinker comprising one double bond
  MOD_RES (11)..(11): Alpha-Me S5-pentenyl-alanine olefin amino acids connected by an all-carbon i to i+4 crosslinker comprising one double bond
  C-term NH2
  Crosslinked Sequence
LTFAAWWAQLAA

SEQ ID NO: 509 - protein, 12 aa, Artificial Sequence
  Description of Artificial Sequence: Synthetic peptide
  N-term Ac
  MOD_RES (4)..(4): Alpha-Me R8-octenyl-alanine olefin amino acids connected by an all-carbon i to i+7 crosslinker comprising one double bond
  MOD_RES (11)..(11): Alpha-Me S5-pentenyl-alanine olefin amino acids connected by an all-carbon i to i+4 crosslinker comprising one double bond
  C-term NH2
  Crosslinked Sequence
LTFAAYWAQIAA

SEQ ID NO: 510 - protein, 12 aa, Artificial Sequence
  Description of Artificial Sequence: Synthetic peptide
  N-term Ac
  MOD_RES (4)..(4): Alpha-Me R8-octenyl-alanine olefin amino acids connected by an all-carbon i to i+7 crosslinker comprising one double bond
  MOD_RES (10)..(10): Norleucine
  MOD_RES (11)..(11): Alpha-Me S5-pentenyl-alanine olefin amino acids connected by an all-carbon i to i+4 crosslinker comprising one double bond
  C-term NH2
  Crosslinked Sequence
LTFAAYWAQLAA

SEQ ID NO: 511 - protein, 13 aa, Artificial Sequence
  Description of Artificial Sequence: Synthetic peptide
  N-term Ac
  MOD_RES (4)..(4): Alpha-Me R8-octenyl-alanine olefin amino acids connected by an all-carbon i to i+7 crosslinker comprising one double bond
  MOD_RES (11)..(11): Alpha-Me S5-pentenyl-alanine olefin amino acids connected by an all-carbon i to i+4 crosslinker comprising one double bond
  C-term NH2
  Crosslinked Sequence
LTFAAYWAQLAAA

SEQ ID NO: 512 - protein, 12 aa, Artificial Sequence
  Description of Artificial Sequence: Synthetic peptide
  N-term Ac
  MOD_RES (4)..(4): Alpha-Me R8-octenyl-alanine olefin amino acids connected by an all-carbon i to i+7 crosslinker comprising one double bond
  MOD_RES (11)..(11): Alpha-Me S5-pentenyl-alanine olefin amino acids connected by an all-carbon i to i+4 crosslinker comprising one double bond
  C-term NH2
  Crosslinked Sequence
LTFAHWWAQLAS

SEQ ID NO: 513 - protein, 12 aa, Artificial Sequence
  Description of Artificial Sequence: Synthetic peptide
  N-term Ac
  MOD_RES (4)..(4): Alpha-Me R8-octenyl-alanine olefin amino acids connected by an all-carbon i to i+7 crosslinker comprising one double bond
  MOD_RES (11)..(11): Alpha-Me S5-pentenyl-alanine olefin amino acids connected by an all-carbon i to i+4 crosslinker comprising one double bond
  C-term NH2
  Crosslinked Sequence
LTFAHRWAQLAS

SEQ ID NO: 514 - protein, 12 aa, Artificial Sequence
  Description of Artificial Sequence: Synthetic peptide
  N-term Ac
  MOD_RES (4)..(4): Alpha-Me R8-octenyl-alanine olefin amino acids connected by an all-carbon i to i+7 crosslinker comprising one double bond
  MOD_RES (11)..(11): Alpha-Me S5-pentenyl-alanine olefin amino acids connected by an all-carbon i to i+4 crosslinker comprising one double bond
  C-term NH2
  Crosslinked Sequence
LTFAHKWAQLAS

SEQ ID NO: 515 - protein, 12 aa, Artificial Sequence
  Description of Artificial Sequence: Synthetic peptide
  N-term Ac
  MOD_RES (4)..(4): Alpha-Me R8-octenyl-alanine olefin amino acids connected by an all-carbon i to i+7 crosslinker comprising one double bond
  MOD_RES (11)..(11): Alpha-Me S5-pentenyl-alanine olefin amino acids connected by an all-carbon i to i+4 crosslinker comprising one double bond
  C-term NH2
  Crosslinked Sequence
LTFAHYWAQLAW

SEQ ID NO: 516 - protein, 10 aa, Artificial Sequence
  Description of Artificial Sequence: Synthetic peptide
  N-term Ac
  MOD_RES (2)..(2): Alpha-Me R8-octenyl-alanine olefin amino acids connected by an all-carbon i to i+7 crosslinker comprising one double bond
  MOD_RES (6)..(6): Abu
  MOD_RES (9)..(9): Alpha-Me S5-pentenyl-alanine olefin amino acids connected by an all-carbon i to i+4 crosslinker comprising one double bond
  C-term NH2
  Crosslinked Sequence
FAAYWXALAA

SEQ ID NO: 517 - protein, 10 aa, Artificial Sequence
  Description of Artificial Sequence: Synthetic peptide
  N-term Ac
  MOD_RES (2)..(2): Alpha-Me R8-octenyl-alanine olefin amino acids connected by an all-carbon i to i+7 crosslinker comprising one double bond
  MOD_RES (3)..(3): Abu
  MOD_RES (9)..(9): Alpha-Me S5-pentenyl-alanine olefin amino acids connected by an all-carbon i to i+4 crosslinker comprising one double bond
  C-term NH2
  Crosslinked Sequence
FAXYWEALAA

SEQ ID NO: 518 - protein, 14 aa, Artificial Sequence
  Description of Artificial Sequence: Synthetic peptide
  N-term Ac
  MOD_RES (1)..(1): Norleucine
  MOD_RES (5)..(5): Alpha-methyl R8-octenyl-alanine olefin amino acid connected by an all-carbon crosslinker that is fully saturated
  MOD_RES (12)..(12): Alpha-methyl S5-pentenyl-alanine olefin amino acid connected by an all-carbon crosslinker that is fully saturated
  C-term NH2
  Crosslinked Sequence
LPRFANYWRLLAQN

SEQ ID NO: 519 - protein, 12 aa, Artificial Sequence
  Description of Artificial Sequence: Synthetic peptide
  N-term Ac
  MOD_RES (4)..(4): Alpha-methyl R8-octenyl-alanine olefin amino acid connected by an all-carbon crosslinker that is fully saturated
  MOD_RES (11)..(11): Alpha-methyl S5-pentenyl-alanine olefin amino acid connected by an all-carbon crosslinker that is fully saturated
  C-term NH2
  Crosslinked Sequence
TSFAHYWAQLAS

SEQ ID NO: 520 - protein, 12 aa, Artificial Sequence
  Description of Artificial Sequence: Synthetic peptide
  N-term Ac
  MOD_RES (4)..(4): Alpha-methyl R8-octenyl-alanine olefin amino acid connected by an all-carbon crosslinker that is fully saturated
  MOD_RES (11)..(11): Alpha-methyl S5-pentenyl-alanine olefin amino acid connected by an all-carbon crosslinker that is fully saturated
  C-term NH2
  Crosslinked Sequence
LTFAAYWAQLAS

SEQ ID NO: 521 - protein, 12 aa, Artificial Sequence
  Description of Artificial Sequence: Synthetic peptide
  N-term Ac
  MOD_RES (4)..(4): Alpha-Me R8-octenyl-alanine olefin amino acids connected by an all-carbon i to i+7 crosslinker comprising one double bond
  MOD_RES (11)..(11): Alpha-Me S5-pentenyl-alanine olefin amino acids connected by an all-carbon i to i+4 crosslinker comprising one double bond
  C-term NH2
  Crosslinked Sequence
HTFAHYWAQLAS

SEQ ID NO: 522 - protein, 12 aa, Artificial Sequence
  Description of Artificial Sequence: Synthetic peptide
  N-term Ac
  MOD_RES (4)..(4): Alpha-Me R8-octenyl-alanine olefin amino acids connected by an all-carbon i to i+7 crosslinker comprising one double bond
  MOD_RES (11)..(11): Alpha-Me S5-pentenyl-alanine olefin amino acids connected by an all-carbon i to i+4 crosslinker comprising one double bond
  C-term NH2
  Crosslinked Sequence
LHFAHYWAQLAS

SEQ ID NO: 523 - protein, 12 aa, Artificial Sequence
  Description of Artificial Sequence: Synthetic peptide
  N-term Ac
  MOD_RES (4)..(4): Alpha-Me R8-octenyl-alanine olefin amino acids connected by an all-carbon i to i+7 crosslinker comprising one double bond
  MOD_RES (11)..(11): Alpha-Me S5-pentenyl-alanine olefin amino acids connected by an all-carbon i to i+4 crosslinker comprising one double bond
  C-term NH2
  Crosslinked Sequence
LTFAHHWAQLAS

SEQ ID NO: 524 - protein, 12 aa, Artificial Sequence
  Description of Artificial Sequence: Synthetic peptide
  N-term Ac
  MOD_RES (4)..(4): Alpha-Me R8-octenyl-alanine olefin amino acids connected by an all-carbon i to i+7 crosslinker comprising one double bond
  MOD_RES (11)..(11): Alpha-Me S5-pentenyl-alanine olefin amino acids connected by an all-carbon i to i+4 crosslinker comprising one double bond
  C-term NH2
  Crosslinked Sequence
LTFAHYWHQLAS

SEQ ID NO: 525 - protein, 12 aa, Artificial Sequence
  Description of Artificial Sequence: Synthetic peptide
  N-term Ac
  MOD_RES (4)..(4): Alpha-Me R8-octenyl-alanine olefin amino acids connected by an all-carbon i to i+7 crosslinker comprising one double bond
  MOD_RES (11)..(11): Alpha-Me S5-pentenyl-alanine olefin amino acids connected by an all-carbon i to i+4 crosslinker comprising one double bond
  C-term NH2
  Crosslinked Sequence
LTFAHYWAHLAS

SEQ ID NO: 526 - protein, 12 aa, Artificial Sequence
  Description of Artificial Sequence: Synthetic peptide
  N-term Ac
  MOD_RES (4)..(4): Alpha-Me R8-octenyl-alanine olefin amino acids connected by an all-carbon i to i+7 crosslinker comprising one double bond
  MOD_RES (11)..(11): Alpha-Me S5-pentenyl-alanine olefin amino acids connected by an all-carbon i to i+4 crosslinker comprising one double bond
  C-term NH2
  Crosslinked Sequence
LTFAHYWAQLAH

SEQ ID NO: 527 - protein, 12 aa, Artificial Sequence
  Description of Artificial Sequence: Synthetic peptide
  N-term Ac
  MOD_RES (4)..(4): Alpha-Me R8-octenyl-alanine olefin amino acids connected by an all-carbon i to i+7 crosslinker comprising one double bond
  MOD_RES (11)..(11): Alpha-Me S5-pentenyl-alanine olefin amino acids connected by an all-carbon i to i+4 crosslinker comprising one double bond
  C-term NHPr
  Crosslinked Sequence
LTFAHYWAQLAS

SEQ ID NO: 528 - protein, 12 aa, Artificial Sequence
  Description of Artificial Sequence: Synthetic peptide
  N-term Ac
  MOD_RES (4)..(4): Alpha-Me R8-octenyl-alanine olefin amino acids connected by an all-carbon i to i+7 crosslinker comprising one double bond
  MOD_RES (11)..(11): Alpha-Me S5-pentenyl-alanine olefin amino acids connected by an all-carbon i to i+4 crosslinker comprising one double bond
  C-term NHsBu
  Crosslinked Sequence
LTFAHYWAQLAS

SEQ ID NO: 529 - protein, 12 aa, Artificial Sequence
  Description of Artificial Sequence: Synthetic peptide
  N-term Ac
  MOD_RES (4)..(4): Alpha-Me R8-octenyl-alanine olefin amino acids connected by an all-carbon i to i+7 crosslinker comprising one double bond
  MOD_RES (11)..(11): Alpha-Me S5-pentenyl-alanine olefin amino acids connected by an all-carbon i to i+4 crosslinker comprising one double bond
  C-term NHiBu
  Crosslinked Sequence
LTFAHYWAQLAS

SEQ ID NO: 530 - protein, 12 aa, Artificial Sequence
  Description of Artificial Sequence: Synthetic peptide
  N-term Ac
  MOD_RES (4)..(4): Alpha-Me R8-octenyl-alanine olefin amino acids connected by an all-carbon i to i+7 crosslinker comprising one double bond
  MOD_RES (11)..(11): Alpha-Me S5-pentenyl-alanine olefin amino acids connected by an all-carbon i to i+4 crosslinker comprising one double bond
  C-term NHBn
  Crosslinked Sequence
LTFAHYWAQLAS

SEQ ID NO: 531 - protein, 12 aa, Artificial Sequence
  Description of Artificial Sequence: Synthetic peptide
  N-term Ac
  MOD_RES (4)..(4): Alpha-Me R8-octenyl-alanine olefin amino acids connected by an all-carbon i to i+7 crosslinker comprising one double bond
  MOD_RES (11)..(11): Alpha-Me S5-pentenyl-alanine olefin amino acids connected by an all-carbon i to i+4 crosslinker comprising one double bond
  C-term NHPe
  Crosslinked Sequence
LTFAHYWAQLAS

SEQ ID NO: 532 - protein, 12 aa, Artificial Sequence
  Description of Artificial Sequence: Synthetic peptide
  N-term Ac
  MOD_RES (4)..(4): Alpha-Me R8-octenyl-alanine olefin amino acids connected by an all-carbon i to i+7 crosslinker comprising one double bond
  MOD_RES (11)..(11): Alpha-Me S5-pentenyl-alanine olefin amino acids connected by an all-carbon i to i+4 crosslinker comprising one double bond
  C-term NHChx
  Crosslinked Sequence
LTFAHYWAQLAS

SEQ ID NO: 533 - protein, 12 aa, Artificial Sequence
  Description of Artificial Sequence: Synthetic peptide
  N-term Ac
  MOD_RES (4)..(4): Alpha-Me R8-octenyl-alanine olefin amino acids connected by an all-carbon i to i+7 crosslinker comprising one double bond
  MOD_RES (11)..(11): Alpha-Me S5-pentenyl-alanine olefin amino acids connected by an all-carbon i to i+4 crosslinker comprising one double bond
  C-term NH2
  Crosslinked Sequence
ETFAAYWAQLAS

SEQ ID NO: 534 - protein, 12 aa, Artificial Sequence
  Description of Artificial Sequence: Synthetic peptide
  N-term Ac
  MOD_RES (4)..(4): Alpha-Me R8-octenyl-alanine olefin amino acids connected by an all-carbon i to i+7 crosslinker comprising one double bond
  MOD_RES (11)..(11): Alpha-Me S5-pentenyl-alanine olefin amino acids connected by an all-carbon i to i+4 crosslinker comprising one double bond
  C-term NH2
  Crosslinked Sequence
STFAAYWAQLAS

SEQ ID NO: 535 - protein, 12 aa, Artificial Sequence
  Description of Artificial Sequence: Synthetic peptide
  N-term Ac
  MOD_RES (4)..(4): Alpha-Me R8-octenyl-alanine olefin amino acids connected by an all-carbon i to i+7 crosslinker comprising one double bond
  MOD_RES (11)..(11): Alpha-Me S5-pentenyl-alanine olefin amino acids connected by an all-carbon i to i+4 crosslinker comprising one double bond
  C-term NH2
  Crosslinked Sequence
LEFAAYWAQLAS

SEQ ID NO: 536 - protein, 12 aa, Artificial Sequence
  Description of Artificial Sequence: Synthetic peptide
  N-term Ac
  MOD_RES (4)..(4): Alpha-Me R8-octenyl-alanine olefin amino acids connected by an all-carbon i to i+7 crosslinker comprising one double bond
  MOD_RES (11)..(11): Alpha-Me S5-pentenyl-alanine olefin amino acids connected by an all-carbon i to i+4 crosslinker comprising one double bond
  C-term NH2
  Crosslinked Sequence
LSFAAYWAQLAS

SEQ ID NO: 537 - protein, 12 aa, Artificial Sequence
  Description of Artificial Sequence: Synthetic peptide
  N-term Ac
  MOD_RES (4)..(4): Alpha-Me R8-octenyl-alanine olefin amino acids connected by an all-carbon i to i+7 crosslinker comprising one double bond
  MOD_RES (11)..(11): Alpha-Me S5-pentenyl-alanine olefin amino acids connected by an all-carbon i to i+4 crosslinker comprising one double bond
  C-term NH2
  Crosslinked Sequence
LTFAEYWAQLAS

SEQ ID NO: 538 - protein, 12 aa, Artificial Sequence
  Description of Artificial Sequence: Synthetic peptide
  N-term Ac
  MOD_RES (4)..(4): Alpha-Me R8-octenyl-alanine olefin amino acids connected by an all-carbon i to i+7 crosslinker comprising one double bond
  MOD_RES (11)..(11): Alpha-Me S5-pentenyl-alanine olefin amino acids connected by an all-carbon i to i+4 crosslinker comprising one double bond
  C-term NH2
  Crosslinked Sequence
LTFASYWAQLAS

SEQ ID NO: 539 - protein, 12 aa, Artificial Sequence
  Description of Artificial Sequence: Synthetic peptide
  N-term Ac
  MOD_RES (4)..(4): Alpha-Me R8-octenyl-alanine olefin amino acids connected by an all-carbon i to i+7 crosslinker comprising one double bond
  MOD_RES (11)..(11): Alpha-Me S5-pentenyl-alanine olefin amino acids connected by an all-carbon i to i+4 crosslinker comprising one double bond
  C-term NH2
  Crosslinked Sequence
LTFAAYWEQLAS

SEQ ID NO: 540 - protein, 12 aa, Artificial Sequence
  Description of Artificial Sequence: Synthetic peptide
  N-term Ac
  MOD_RES (4)..(4): Alpha-Me R8-octenyl-alanine olefin amino acids connected by an all-carbon i to i+7 crosslinker comprising one double bond
  MOD_RES (11)..(11): Alpha-Me S5-pentenyl-alanine olefin amino acids connected by an all-carbon i to i+4 crosslinker comprising one double bond
  C-term NH2
  Crosslinked Sequence
LTFAAYWAELAS

SEQ ID NO: 541 - protein, 12 aa, Artificial Sequence
  Description of Artificial Sequence: Synthetic peptide
  N-term Ac
  MOD_RES (4)..(4): Alpha-Me R8-octenyl-alanine olefin amino acids connected by an all-carbon i to i+7 crosslinker comprising one double bond
  MOD_RES (11)..(11): Alpha-Me S5-pentenyl-alanine olefin amino acids connected by an all-carbon i to i+4 crosslinker comprising one double bond
  C-term NH2
  Crosslinked Sequence
LTFAAYWASLAS

SEQ ID NO: 542 - protein, 12 aa, Artificial Sequence
  Description of Artificial Sequence: Synthetic peptide
  N-term Ac
  MOD_RES (4)..(4): Alpha-Me R8-octenyl-alanine olefin amino acids connected by an all-carbon i to i+7 crosslinker comprising one double bond
  MOD_RES (11)..(11): Alpha-Me S5-pentenyl-alanine olefin amino acids connected by an all-carbon i to i+4 crosslinker comprising one double bond
  C-term NH2
  Crosslinked Sequence
LTFAAYWAQLAE

SEQ ID NO: 543 - protein, 12 aa, Artificial Sequence
  Description of Artificial Sequence: Synthetic peptide
  N-term Ac
  MOD_RES (3)..(3): Phe-2CN
  MOD_RES (4)..(4): Alpha-Me R8-octenyl-alanine olefin amino acids connected by an all-carbon i to i+7 crosslinker comprising one double bond
  MOD_RES (11)..(11): Alpha-Me S5-pentenyl-alanine olefin amino acids connected by an all-carbon i to i+4 crosslinker comprising one double bond
  C-term NH2
  Crosslinked Sequence
LTFAHYWAQLAS

SEQ ID NO: 544 - protein, 12 aa, Artificial Sequence
  Description of Artificial Sequence: Synthetic peptide
  N-term Ac
  MOD_RES (3)..(3): Phe-3Cl
  MOD_RES (4)..(4): Alpha-Me R8-octenyl-alanine olefin amino acids connected by an all-carbon i to i+7 crosslinker comprising one double bond
  MOD_RES (11)..(11): Alpha-Me S5-pentenyl-alanine olefin amino acids connected by an all-carbon i to i+4 crosslinker comprising one double bond
  C-term NH2
  Crosslinked Sequence
LTFAHYWAQLAS

SEQ ID NO: 545 - protein, 12 aa, Artificial Sequence
  Description of Artificial Sequence: Synthetic peptide
  N-term Ac
  MOD_RES (3)..(3): 3,3-diphenyl-Ala
  MOD_RES (4)..(4): Alpha-Me R8-octenyl-alanine olefin amino acids connected by an all-carbon i to i+7 crosslinker comprising one double bond
  MOD_RES (11)..(11): Alpha-Me S5-pentenyl-alanine olefin amino acids connected by an all-carbon i to i+4 crosslinker comprising one double bond
  C-term NH2
  Crosslinked Sequence
LTFAHYWAQLAS

SEQ ID NO: 546 - protein, 12 aa, Artificial Sequence
  Description of Artificial Sequence: Synthetic peptide
  N-term Ac
  MOD_RES (4)..(4): Alpha-Me R8-octenyl-alanine olefin amino acids connected by an all-carbon i to i+7 crosslinker comprising one double bond
  MOD_RES (10)..(10): Tert-butyl-Gly
  MOD_RES (11)..(11): Alpha-Me S5-pentenyl-alanine olefin amino acids connected by an all-carbon i to i+4 crosslinker comprising one double bond
  C-term NH2
  Crosslinked Sequence
LTFAHYWAQGAS

SEQ ID NO: 547 - protein, 10 aa, Artificial Sequence
  Description of Artificial Sequence: Synthetic peptide
  N-term Ac
  MOD_RES (2)..(2): Alpha-Me R8-octenyl-alanine olefin amino acids connected by an all-carbon i to i+7 crosslinker comprising one double bond
  MOD_RES (5)..(5): 6cl-Trp
  MOD_RES (9)..(9): Alpha-Me S5-pentenyl-alanine olefin amino acids connected by an all-carbon i to i+4 crosslinker comprising one double bond
  C-term NH2
  Crosslinked Sequence
FAAYWEALAA

SEQ ID NO: 548 - protein, 10 aa, Artificial Sequence
  Description of Artificial Sequence: Synthetic peptide
  N-term Ac
  MOD_RES (2)..(2): Alpha-Me R8-octenyl-alanine olefin amino acids connected by an all-carbon i to i+7 crosslinker comprising one double bond
  MOD_RES (5)..(5): dl6br-Trp
  MOD_RES (9)..(9): Alpha-Me S5-pentenyl-alanine olefin amino acids connected by an all-carbon i to i+4 crosslinker comprising one double bond
  C-term NH2
  Crosslinked Sequence
FAAYWEALAA

SEQ ID NO: 549 - protein, 10 aa, Artificial Sequence
  Description of Artificial Sequence: Synthetic peptide
  N-term Ac
  MOD_RES (2)..(2): Alpha-Me R8-octenyl-alanine olefin amino acids connected by an all-carbon i to i+7 crosslinker comprising one double bond
  MOD_RES (5)..(5): dl6f-Trp
  MOD_RES (9)..(9): Alpha-Me S5-pentenyl-alanine olefin amino acids connected by an all-carbon i to i+4 crosslinker comprising one double bond
  C-term NH2
  Crosslinked Sequence
FAAYWEALAA

SEQ ID NO: 550 - protein, 10 aa, Artificial Sequence
  Description of Artificial Sequence: Synthetic peptide
  N-term Ac
  MOD_RES (2)..(2): Alpha-Me R8-octenyl-alanine olefin amino acids connected by an all-carbon i to i+7 crosslinker comprising one double bond
  MOD_RES (5)..(5): dl4m-Trp
  MOD_RES (9)..(9): Alpha-Me S5-pentenyl-alanine olefin amino acids connected by an all-carbon i to i+4 crosslinker comprising one double bond
  C-term NH2
  Crosslinked Sequence
FAAYWEALAA

SEQ ID NO: 551 - protein, 10 aa, Artificial Sequence
  Description of Artificial Sequence: Synthetic peptide
  N-term Ac
  MOD_RES (2)..(2): Alpha-Me R8-octenyl-alanine olefin amino acids connected by an all-carbon i to i+7 crosslinker comprising one double bond
  MOD_RES (5)..(5): dl5cl-Trp
  MOD_RES (9)..(9): Alpha-Me S5-pentenyl-alanine olefin amino acids connected by an all-carbon i to i+4 crosslinker comprising one double bond
  C-term NH2
  Crosslinked Sequence
FAAYWEALAA

SEQ ID NO: 552 - protein, 10 aa, Artificial Sequence
  Description of Artificial Sequence: Synthetic peptide
  N-term Ac
  MOD_RES (2)..(2): Alpha-Me R8-octenyl-alanine olefin amino acids connected by an all-carbon i to i+7 crosslinker comprising one double bond
  MOD_RES (5)..(5): dl7m-Trp
  MOD_RES (9)..(9): Alpha-Me S5-pentenyl-alanine olefin amino acids connected by an all-carbon i to i+4 crosslinker comprising one double bond
  C-term NH2
  Crosslinked Sequence
FAAYWEALAA

SEQ ID NO: 553 - protein, 12 aa, Artificial Sequence
  Description of Artificial Sequence: Synthetic peptide
  N-term Ac
  MOD_RES (4)..(4): Alpha-methyl R8-octenyl-alanine olefin amino acid connected by an all-carbon crosslinker that is fully saturated
  MOD_RES (11)..(11): Alpha-methyl S5-pentenyl-alanine olefin amino acid connected by an all-carbon crosslinker that is fully saturated
  C-term NH2
  Crosslinked Sequence
LTFAHYWAQLAA

SEQ ID NO: 554 - protein, 12 aa, Artificial Sequence
  Description of Artificial Sequence: Synthetic peptide
  N-term Ac
  MOD_RES (4)..(4): Alpha-Me R8-octenyl-alanine olefin amino acids connected by an all-carbon i to i+7 crosslinker comprising one double bond
  MOD_RES (6)..(6): (S)-2-amino-3-(7-methoxy-2-oxo-2H-chromene-3-yl) propanoic acid
  MOD_RES (11)..(11): Alpha-Me S5-pentenyl-alanine olefin amino acids connected by an all-carbon i to i+4 crosslinker comprising one double bond
  C-term NH2
  Crosslinked Sequence
LTFAHXWAQLAS

SEQ ID NO: 555 - protein, 12 aa, Artificial Sequence
  Description of Artificial Sequence: Synthetic peptide
  N-term Ac
  MOD_RES (6)..(6): (S)-2-amino-3-(7-methoxy-2-oxo-2H-chromene-3-yl) propanoic acid
  C-term NH2
  Crosslinked Sequence
LTFEHXWAQLTS

SEQ ID NO: 556 - protein, 12 aa, Artificial Sequence
  Description of Artificial Sequence: Synthetic peptide
  N-term Ac
  MOD_RES (4)..(4): Alpha-Me R8-octenyl-alanine olefin amino acids connected by an all-carbon i to i+7 crosslinker comprising one double bond
  MOD_RES (6)..(6): (S)-2-amino-3-(7-methoxy-2-oxo-2H-chromene-3-yl) propanoic acid
  MOD_RES (11)..(11): Alpha-Me S5-pentenyl-alanine olefin amino acids connected by an all-carbon i to i+4 crosslinker comprising one double bond
  C-term NH2
  Crosslinked Sequence
LTAAHXWAQLAS

SEQ ID NO: 557 - protein, 11 aa, Artificial Sequence
  Description of Artificial Sequence: Synthetic peptide
  N-term Ac
  MOD_RES (2)..(2): Alpha-Me R8-octenyl-alanine olefin amino acids connected by an all-carbon i to i+7 crosslinker comprising one double bond
  MOD_RES (9)..(9): Alpha-Me S5-pentenyl-alanine olefin amino acids connected by an all-carbon i to i+4 crosslinker comprising one double bond
  MOD_RES (10)..(10): Abu
  C-term NH2
  Crosslinked Sequence
FAAYWEALAXA

SEQ ID NO: 558 - protein, 11 aa, Artificial Sequence
  Description of Artificial Sequence: Synthetic peptide
  N-term Ac
  MOD_RES (2)..(2): Alpha-Me R8-octenyl-alanine olefin amino acids connected by an all-carbon i to i+7 crosslinker comprising one double bond
  MOD_RES (9)..(9): Alpha-Me S5-pentenyl-alanine olefin amino acids connected by an all-carbon i to i+4 crosslinker comprising one double bond
  C-term NH2
  Crosslinked Sequence
FAAYWEAIAAA

SEQ ID NO: 559 - protein, 11 aa, Artificial Sequence
  Description of Artificial Sequence: Synthetic peptide
  N-term Ac
  MOD_RES (2)..(2): Alpha-Me R8-octenyl-alanine olefin amino acids connected by an all-carbon i to i+7 crosslinker comprising one double bond
  MOD_RES (8)..(8): Norleucine
  MOD_RES (9)..(9): Alpha-Me S5-pentenyl-alanine olefin amino acids connected by an all-carbon i to i+4 crosslinker comprising one double bond
  C-term NH2
  Crosslinked Sequence
FAAYWEALAAA

SEQ ID NO: 560 - protein, 11 aa, Artificial Sequence
  Description of Artificial Sequence: Synthetic peptide
  N-term Ac
  MOD_RES (2)..(2): Alpha-Me R8-octenyl-alanine olefin amino acids connected by an all-carbon i to i+7 crosslinker comprising one double bond
  MOD_RES (7)..(7): Alpha-Me-Leu
  MOD_RES (9)..(9): Alpha-Me S5-pentenyl-alanine olefin amino acids connected by an all-carbon i to i+4 crosslinker comprising one double bond
  C-term NH2
  Crosslinked Sequence
FAAYWELLAAA

SEQ ID NO: 561 - protein, 11 aa, Artificial Sequence
  Description of Artificial Sequence: Synthetic peptide
  N-term Ac
  MOD_RES (2)..(2): Alpha-Me R8-octenyl-alanine olefin amino acids connected by an all-carbon i to i+7 crosslinker comprising one double bond
  MOD_RES (9)..(9): Alpha-Me S5-pentenyl-alanine olefin amino acids connected by an all-carbon i to i+4 crosslinker comprising one double bond
  C-term NH2
  Crosslinked Sequence
FAAYWQALAAA

SEQ ID NO: 562 - protein, 11 aa, Artificial Sequence
  Description of Artificial Sequence: Synthetic peptide
  N-term Ac
  MOD_RES (2)..(2): Alpha-Me R8-octenyl-alanine olefin amino acids connected by an all-carbon i to i+7 crosslinker comprising one double bond
  MOD_RES (9)..(9): Alpha-Me S5-pentenyl-alanine olefin amino acids connected by an all-carbon i to i+4 crosslinker comprising one double bond
  C-term NH2
  Crosslinked Sequence
FAAYWAALAAA

SEQ ID NO: 563 - protein, 11 aa, Artificial Sequence
  Description of Artificial Sequence: Synthetic peptide
  N-term Ac
  MOD_RES (2)..(2): Alpha-Me R8-octenyl-alanine olefin amino acids connected by an all-carbon i to i+7 crosslinker comprising one double bond
  MOD_RES (6)..(6): Abu
  MOD_RES (9)..(9): Alpha-Me S5-pentenyl-alanine olefin amino acids connected by an all-carbon i to i+4 crosslinker comprising one double bond
  C-term NH2
  Crosslinked Sequence
FAAYWXALAAA

SEQ ID NO: 564 - protein, 11 aa, Artificial Sequence
  Description of Artificial Sequence: Synthetic peptide
  N-term Ac
  MOD_RES (2)..(2): Alpha-Me R8-octenyl-alanine olefin amino acids connected by an all-carbon i to i+7 crosslinker comprising one double bond
  MOD_RES (6)..(6): Norleucine
  MOD_RES (9)..(9): Alpha-Me S5-pentenyl-alanine olefin amino acids connected by an all-carbon i to i+4 crosslinker comprising one double bond
  C-term NH2
  Crosslinked Sequence
FAAYWLALAAA

SEQ ID NO: 565 - protein, 11 aa, Artificial Sequence
  Description of Artificial Sequence: Synthetic peptide
  N-term Ac
  MOD_RES (2)..(2): Alpha-Me R8-octenyl-alanine olefin amino acids connected by an all-carbon i to i+7 crosslinker comprising one double bond
  MOD_RES (3)..(3): Abu
  MOD_RES (9)..(9): Alpha-Me S5-pentenyl-alanine olefin amino acids connected by an all-carbon i to i+4 crosslinker comprising one double bond
  C-term NH2
  Crosslinked Sequence
FAXYWEALAAA

SEQ ID NO: 566 - protein, 11 aa, Artificial Sequence
  Description of Artificial Sequence: Synthetic peptide
  N-term Ac
  MOD_RES (2)..(2): Alpha-Me R8-octenyl-alanine olefin amino acids connected by an all-carbon i to i+7 crosslinker comprising one double bond
  MOD_RES (3)..(3): Norleucine
  MOD_RES (9)..(9): Alpha-Me S5-pentenyl-alanine olefin amino acids connected by an all-carbon i to i+4 crosslinker comprising one double bond
  C-term NH2
  Crosslinked Sequence
FALYWEALAAA

SEQ ID NO: 567 - protein, 11 aa, Artificial Sequence
  Description of Artificial Sequence: Synthetic peptide
  N-term Ac
  MOD_RES (2)..(2): Alpha-Me R8-octenyl-alanine olefin amino acids connected by an all-carbon i to i+7 crosslinker comprising one double bond
  MOD_RES (9)..(9): Alpha-Me S5-pentenyl-alanine olefin amino acids connected by an all-carbon i to i+4 crosslinker comprising one double bond
  C-term NH2
  Crosslinked Sequence
FAFYWEALAAA

SEQ ID NO: 568 - protein, 12 aa, Artificial Sequence
  Description of Artificial Sequence: Synthetic peptide
  N-term Ac
  MOD_RES (4)..(4): Alpha-Me R8-octenyl-alanine olefin amino acids connected by an all-carbon i to i+7 crosslinker comprising one double bond
  MOD_RES (10)..(10): Homo-Leu
  MOD_RES (11)..(11): Alpha-Me S5-pentenyl-alanine olefin amino acids connected by an all-carbon i to i+4 crosslinker comprising one double bond
  C-term NH2
  Crosslinked Sequence
LTFAHYWAQLAS

SEQ ID NO: 569 - protein, 12 aa, Artificial Sequence
  Description of Artificial Sequence: Synthetic peptide
  N-term Ac
  MOD_RES (4)..(4): Alpha-Me R8-octenyl-alanine olefin amino acids connected by an all-carbon i to i+7 crosslinker comprising one double bond
  MOD_RES (10)..(10): Adamantyl-Gly
  MOD_RES (11)..(11): Alpha-Me S5-pentenyl-alanine olefin amino acids connected by an all-carbon i to i+4 crosslinker comprising one double bond
  C-term NH2
  Crosslinked Sequence
LTFAHYWAQGAS

SEQ ID NO: 570 - protein, 12 aa, Artificial Sequence
  Description of Artificial Sequence: Synthetic peptide
  N-term Ac
  MOD_RES (4)..(4): Alpha-Me R8-octenyl-alanine olefin amino acids connected by an all-carbon i to i+7 crosslinker comprising one double bond
  MOD_RES (10)..(10): Indanyl-Gly
  MOD_RES (11)..(11): Alpha-Me S5-pentenyl-alanine olefin amino acids connected by an all-carbon i to i+4 crosslinker comprising one double bond
  C-term NH2
  Crosslinked Sequence
LTFAHYWAQGAS

SEQ ID NO: 571 - protein, 11 aa, Artificial Sequence
  Description of Artificial Sequence: Synthetic peptide
  N-term Ac
  MOD_RES (2)..(2): Alpha-Me R8-octenyl-alanine olefin amino acids connected by an all-carbon i to i+7 crosslinker comprising one double bond
  MOD_RES (9)..(9): Alpha-Me S5-pentenyl-alanine olefin amino acids connected by an all-carbon i to i+4 crosslinker comprising one double bond
  C-term NH2
  Crosslinked Sequence
FAAYWAQLAAA

SEQ ID NO: 572 - protein, 12 aa, Artificial Sequence
  Description of Artificial Sequence: Synthetic peptide
  N-term Ac
  MOD_RES (4)..(4): Alpha-Me R8-octenyl-alanine olefin amino acids connected by an all-carbon i to i+7 crosslinker comprising one double bond
  MOD_RES (11)..(11): Alpha-Me S5-pentenyl-alanine olefin amino acids connected by an all-carbon i to i+4 crosslinker comprising one double bond
  C-term NH2
  Crosslinked Sequence
LTFAALWAQLAQ

SEQ ID NO: 573 - protein, 11 aa, Artificial Sequence
  Description of Artificial Sequence: Synthetic peptide
  N-term Ac
  MOD_RES (2)..(2): Alpha-Me R8-octenyl-alanine olefin amino acids connected by an all-carbon i to i+7 crosslinker comprising one double bond
  MOD_RES (9)..(9): Alpha-Me S5-pentenyl-alanine olefin amino acids connected by an all-carbon i to i+4 crosslinker comprising one double bond
  C-term NH2
  Crosslinked Sequence
FAAYWEALAAA

SEQ ID NO: 574 - protein, 11 aa, Artificial Sequence
  Description of Artificial Sequence: Synthetic peptide
  N-term Ac
  MOD_RES (2)..(2): Alpha-Me R8-octenyl-alanine olefin amino acids connected by an all-carbon i to i+7 crosslinker comprising one double bond
  MOD_RES (7)..(7): Norleucine
  MOD_RES (9)..(9): Alpha-Me S5-pentenyl-alanine olefin amino acids connected by an all-carbon i to i+4 crosslinker comprising one double bond
  C-term NH2
  Crosslinked Sequence
FAAYWELLAAA

SEQ ID NO: 575 - protein, 10 aa, Artificial Sequence
  Description of Artificial Sequence: Synthetic peptide
  N-term Ac
  MOD_RES (2)..(2): Alpha-Me R8-octenyl-alanine olefin amino acids connected by an all-carbon i to i+7 crosslinker comprising one double bond
  MOD_RES (7)..(7): 2-aminoisobutyric acid
  MOD_RES (9)..(9): Alpha-Me S5-pentenyl-alanine olefin amino acids connected by an all-carbon i to i+4 crosslinker comprising one double bond
  MOD_RES (10)..(10): Abu
  C-term NH2
  Crosslinked Sequence
FAAYWEXLAX

SEQ ID NO: 576 - protein, 10 aa, Artificial Sequence
  Description of Artificial Sequence: Synthetic peptide
  N-term Ac
  MOD_RES (2)..(2): Alpha-Me R8-octenyl-alanine olefin amino acids connected by an all-carbon i to i+7 crosslinker comprising one double bond
  MOD_RES (7)..(7): Norleucine
  MOD_RES (9)..(9): Alpha-Me S5-pentenyl-alanine olefin amino acids connected by an all-carbon i to i+4 crosslinker comprising one double bond
  MOD_RES (10)..(10): Abu
  C-term NH2
  Crosslinked Sequence
FAAYWELLAX

SEQ ID NO: 577 - protein, 10 aa, Artificial Sequence
  Description of Artificial Sequence: Synthetic peptide
  N-term Ac
  MOD_RES (2)..(2): Alpha-Me R8-octenyl-alanine olefin amino acids connected by an all-carbon i to i+7 crosslinker comprising one double bond
  MOD_RES (9)..(9): Alpha-Me S5-pentenyl-alanine olefin amino acids connected by an all-carbon i to i+4 crosslinker comprising one double bond
  MOD_RES (10)..(10): Abu
  C-term NH2
  Crosslinked Sequence
FAAYWEALAX

SEQ ID NO: 578 - protein, 11 aa, Artificial Sequence
  Description of Artificial Sequence: Synthetic peptide
  N-term Ac
  MOD_RES (2)..(2): Alpha-Me R8-octenyl-alanine olefin amino acids connected by an all-carbon i to i+7 crosslinker comprising one double bond
  MOD_RES (7)..(7): Aminocyclopropane carboxylic acid residue
  MOD_RES (9)..(9): Alpha-Me S5-pentenyl-alanine olefin amino acids connected by an all-carbon i to i+4 crosslinker comprising one double bond
  MOD_RES (10)..(10): Abu
  C-term NH2
  Crosslinked Sequence
FAAYWEXLAXA

SEQ ID NO: 579 - protein, 11 aa, Artificial Sequence
  Description of Artificial Sequence: Synthetic peptide
  N-term Ac
  MOD_RES (2)..(2): Alpha-Me R8-octenyl-alanine olefin amino acids connected by an all-carbon i to i+7 crosslinker comprising one double bond
  MOD_RES (7)..(7): Aminocyclopropane carboxylic acid residue
  MOD_RES (9)..(9): Alpha-Me S5-pentenyl-alanine olefin amino acids connected by an all-carbon i to i+4 crosslinker comprising one double bond
  MOD_RES (10)..(10): Norleucine
  C-term NH2
  Crosslinked Sequence
FAAYWEXLALA

SEQ ID NO: 580 - protein, 12 aa, Artificial Sequence
  Description of Artificial Sequence: Synthetic peptide
  N-term H
  MOD_RES (4)..(4): Alpha-Me R8-octenyl-alanine olefin amino acids connected by an all-carbon i to i+7 crosslinker comprising one double bond
  MOD_RES (11)..(11): Alpha-Me S5-pentenyl-alanine olefin amino acids connected by an all-carbon i to i+4 crosslinker comprising one double bond
  C-term NH2
  Crosslinked Sequence
LTFAAYWAQLAS

SEQ ID NO: 581 - protein, 12 aa, Artificial Sequence
  Description of Artificial Sequence: Synthetic peptide
  N-term mdPEG3
  MOD_RES (4)..(4): Alpha-Me R8-octenyl-alanine olefin amino acids connected by an all-carbon i to i+7 crosslinker comprising one double bond
  MOD_RES (11)..(11): Alpha-Me S5-pentenyl-alanine olefin amino acids connected by an all-carbon i to i+4 crosslinker comprising one double bond
  C-term NH2
  Crosslinked Sequence
LTFAAYWAQLAS

SEQ ID NO: 582 - protein, 12 aa, Artificial Sequence
  Description of Artificial Sequence: Synthetic peptide
  N-term mdPEG7
  MOD_RES (4)..(4): Alpha-Me R8-octenyl-alanine olefin amino acids connected by an all-carbon i to i+7 crosslinker comprising one double bond
  MOD_RES (11)..(11): Alpha-Me S5-pentenyl-alanine olefin amino acids connected by an all-carbon i to i+4 crosslinker comprising one double bond
  C-term NH2
  Crosslinked Sequence
LTFAAYWAQLAS

SEQ ID NO: 583 - protein, 10 aa, Artificial Sequence
  Description of Artificial Sequence: Synthetic peptide
  N-term Ac
  MOD_RES (2)..(2): Alpha-Me R8-octenyl-alanine olefin amino acids connected by an all-carbon i to i+7 crosslinker comprising one double bond
  MOD_RES (4)..(4): Phosphoromethylphenylalanine-Et
  MOD_RES (5)..(5): 6cl-Trp
  MOD_RES (9)..(9): Alpha-Me S5-pentenyl-alanine olefin amino acids connected by an all-carbon i to i+4 crosslinker comprising one double bond
  C-term NH2
  Crosslinked Sequence
FAAFWEALAA

SEQ ID NO: 584 - protein, 12 aa, Artificial Sequence
  Description of Artificial Sequence: Synthetic peptide
  N-term Ac
  MOD_RES (3)..(3): Phe-3Cl
  MOD_RES (4)..(4): Alpha-Me R8-octenyl-alanine olefin amino acids connected by an all-carbon i to i+7 crosslinker comprising one double bond
  MOD_RES (11)..(11): Alpha-Me S5-pentenyl-alanine olefin amino acids connected by an all-carbon i to i+4 crosslinker comprising one double bond
  C-term NH2
  Crosslinked Sequence
LTFAAYWAQLAS

SEQ ID NO: 585 - protein, 12 aa, Artificial Sequence
  Description of Artificial Sequence: Synthetic peptide
  N-term Ac
  MOD_RES (3)..(3): Phe-3Cl
  MOD_RES (4)..(4): Alpha-Me R8-octenyl-alanine olefin amino acids connected by an all-carbon i to i+7 crosslinker comprising one double bond
  MOD_RES (11)..(11): Alpha-Me S5-pentenyl-alanine olefin amino acids connected by an all-carbon i to i+4 crosslinker comprising one double bond
  C-term NH2
  Crosslinked Sequence
LTFAHYWAQLAA

SEQ ID NO: 586 - protein, 12 aa, Artificial Sequence
  Description of Artificial Sequence: Synthetic peptide
  N-term Ac
  MOD_RES (3)..(3): Phe-3Cl
  MOD_RES (4)..(4): Alpha-Me R8-octenyl-alanine olefin amino acids connected by an all-carbon i to i+7 crosslinker comprising one double bond
  MOD_RES (11)..(11): Alpha-Me S5-pentenyl-alanine olefin amino acids connected by an all-carbon i to i+4 crosslinker comprising one double bond
  C-term NH2
  Crosslinked Sequence
LTFAHYWWQLAS

SEQ ID NO: 587 - protein, 12 aa, Artificial Sequence
  Description of Artificial Sequence: Synthetic peptide
  N-term Ac
  MOD_RES (3)..(3): Phe-3Cl
  MOD_RES (4)..(4): Alpha-Me R8-octenyl-alanine olefin amino acids connected by an all-carbon i to i+7 crosslinker comprising one double bond
  MOD_RES (11)..(11): Alpha-Me S5-pentenyl-alanine olefin amino acids connected by an all-carbon i to i+4 crosslinker comprising one double bond
  C-term NH2
  Crosslinked Sequence
LTFAAYWWQLAS

SEQ ID NO: 588 - protein, 12 aa, Artificial Sequence
  Description of Artificial Sequence: Synthetic peptide
  N-term Ac
  MOD_RES (4)..(4): Alpha-Me R8-octenyl-alanine olefin amino acids connected by an all-carbon i to i+7 crosslinker comprising one double bond
  MOD_RES (11)..(11): Alpha-Me S5-pentenyl-alanine olefin amino acids connected by an all-carbon i to i+4 crosslinker comprising one double bond
  C-term NH2
  Crosslinked Sequence
LTFAAYWWQLAS

SEQ ID NO: 589 - protein, 12 aa, Artificial Sequence
  Description of Artificial Sequence: Synthetic peptide
  N-term Ac
  MOD_RES (4)..(4): Alpha-Me R8-octenyl-alanine olefin amino acids connected by an all-carbon i to i+7 crosslinker comprising one double bond
  MOD_RES (11)..(11): Alpha-Me S5-pentenyl-alanine olefin amino acids connected by an all-carbon i to i+4 crosslinker comprising one double bond
  C-term NH2
  Crosslinked Sequence
LTFAHYWWQLAA

SEQ ID NO: 590 - protein, 12 aa, Artificial Sequence
  Description of Artificial Sequence: Synthetic peptide
  N-term Ac
  MOD_RES (4)..(4): Alpha-Me R8-octenyl-alanine olefin amino acids connected by an all-carbon i to i+7 crosslinker comprising one double bond
  MOD_RES (11)..(11): Alpha-Me S5-pentenyl-alanine olefin amino acids connected by an all-carbon i to i+4 crosslinker comprising one double bond
  C-term NH2
  Crosslinked Sequence
LTFAAYWWQLAA

SEQ ID NO: 591 - protein, 12 aa, Artificial Sequence
  Description of Artificial Sequence: Synthetic peptide
  N-term Ac
  MOD_RES (3)..(3): Phe-4F
  MOD_RES (4)..(4): Alpha-Me R8-octenyl-alanine olefin amino acids connected by an all-carbon i to i+7 crosslinker comprising one double bond
  MOD_RES (11)..(11): Alpha-Me S5-pentenyl-alanine olefin amino acids connected by an all-carbon i to i+4 crosslinker comprising one double bond
  C-term NH2
  Crosslinked Sequence
LTFAAYWAQLAS

SEQ ID NO: 592 - protein, 12 aa, Artificial Sequence
  Description of Artificial Sequence: Synthetic peptide
  N-term Ac
  MOD_RES (3)..(3): Phe-2F
  MOD_RES (4)..(4): Alpha-Me R8-octenyl-alanine olefin amino acids connected by an all-carbon i to i+7 crosslinker comprising one double bond
  MOD_RES (11)..(11): Alpha-Me S5-pentenyl-alanine olefin amino acids connected by an all-carbon i to i+4 crosslinker comprising one double bond
  C-term NH2
  Crosslinked Sequence
LTFAAYWAQLAS

SEQ ID NO: 593 - protein, 12 aa, Artificial Sequence
  Description of Artificial Sequence: Synthetic peptide
  N-term Ac
  MOD_RES (3)..(3): Phe-3F
  MOD_RES (4)..(4): Alpha-Me R8-octenyl-alanine olefin amino acids connected by an all-carbon i to i+7 crosslinker comprising one double bond
  MOD_RES (11)..(11): Alpha-Me S5-pentenyl-alanine olefin amino acids connected by an all-carbon i to i+4 crosslinker comprising one double bond
  C-term NH2
  Crosslinked Sequence
LTFAAYWAQLAS

SEQ ID NO: 594 - protein, 12 aa, Artificial Sequence
  Description of Artificial Sequence: Synthetic peptide
  N-term Ac
  MOD_RES (3)..(3): Phe-34F2
  MOD_RES (4)..(4): Alpha-Me R8-octenyl-alanine olefin amino acids connected by an all-carbon i to i+7 crosslinker comprising one double bond
  MOD_RES (11)..(11): Alpha-Me S5-pentenyl-alanine olefin amino acids connected by an all-carbon i to i+4 crosslinker comprising one double bond
  C-term NH2
  Crosslinked Sequence
LTFAAYWAQLAS

SEQ ID NO: 595 - protein, 12 aa, Artificial Sequence
  Description of Artificial Sequence: Synthetic peptide
  N-term Ac
  MOD_RES (3)..(3): Phe-35F2
  MOD_RES (4)..(4): Alpha-Me R8-octenyl-alanine olefin amino acids connected by an all-carbon i to i+7 crosslinker comprising one double bond
  MOD_RES (11)..(11): Alpha-Me S5-pentenyl-alanine olefin amino acids connected by an all-carbon i to i+4 crosslinker comprising one double bond
  C-term NH2
  Crosslinked Sequence
LTFAAYWAQLAS

SEQ ID NO: 596 - protein, 10 aa, Artificial Sequence
  Description of Artificial Sequence: Synthetic peptide
  N-term Ac
  MOD_RES (1)..(1): Phe-3Cl
  MOD_RES (2)..(2): Alpha-Me R8-octenyl-alanine olefin amino acids connected by an all-carbon i to i+7 crosslinker comprising one double bond
  MOD_RES (9)..(9): Alpha-Me S5-pentenyl-alanine olefin amino acids connected by an all-carbon i to i+4 crosslinker comprising one double bond
  C-term NH2
  Crosslinked Sequence
FAAYWEALAA

SEQ ID NO: 597 - protein, 11 aa, Artificial Sequence
  Description of Artificial Sequence: Synthetic peptide
  N-term Ac
  MOD_RES (1)..(1): Phe-3Cl
  MOD_RES (2)..(2): Alpha-Me R8-octenyl-alanine olefin amino acids connected by an all-carbon i to i+7 crosslinker comprising one double bond
  MOD_RES (9)..(9): Alpha-Me S5-pentenyl-alanine olefin amino acids connected by an all-carbon i to i+4 crosslinker comprising one double bond
  C-term NH2
  Crosslinked Sequence
FAAYWEALAAA

SEQ ID NO: 598 - protein, 11 aa, Artificial Sequence
  Description of Artificial Sequence: Synthetic peptide
  N-term Ac
  MOD_RES (2)..(2): Alpha-Me R8-octenyl-alanine olefin amino acids connected by an all-carbon i to i+7 crosslinker comprising one double bond
  MOD_RES (5)..(5): 6cl-Trp
  MOD_RES (9)..(9): Alpha-Me S5-pentenyl-alanine olefin amino acids connected by an all-carbon i to i+4 crosslinker comprising one double bond
  C-term NH2
  Crosslinked Sequence
FAAYWEALAAA

SEQ ID NO: 599 - protein, 9 aa, Artificial Sequence
  Description of Artificial Sequence: Synthetic peptide
  N-term Ac
  MOD_RES (2)..(2): Alpha-Me R8-octenyl-alanine olefin amino acids connected by an all-carbon i to i+7 crosslinker comprising one double bond
  MOD_RES (5)..(5): 6cl-Trp
  MOD_RES (9)..(9): Alpha-Me S5-pentenyl-alanine olefin amino acids connected by an all-carbon i to i+4 crosslinker comprising one double bond
  C-term NH2
  Crosslinked Sequence
FAAYWEALA

SEQ ID NO: 600 - protein, 12 aa, Artificial Sequence
  Description of Artificial Sequence: Synthetic peptide
  N-term Ac
  MOD_RES (4)..(4): Alpha-Me R8-octenyl-alanine olefin amino acids connected by an all-carbon i to i+7 crosslinker comprising one double bond
  MOD_RES (11)..(11): Two pentenyl-alanine olefin side chains where one side chain is not crosslinked
  C-term NH2
  May or may not be a Crosslinked Sequence
LTFAHYWAQLAS

SEQ ID NO: 601 - protein, 12 aa, Artificial Sequence
  Description of Artificial Sequence: Synthetic peptide
  N-term Ac
  MOD_RES (4)..(4): Alpha-Me R8-octenyl-alanine olefin amino acids connected by an all-carbon i to i+7 crosslinker comprising one double bond
  MOD_RES (11)..(11): Alpha-Me S5-pentenyl-alanine olefin amino acids connected by an all-carbon i to i+4 crosslinker comprising one double bond
  C-term NHsBu
  Crosslinked Sequence
LTFAHYWAQLAS

SEQ ID NO: 602 - protein, 12 aa, Artificial Sequence
  Description of Artificial Sequence: Synthetic peptide
  N-term Ac
  MOD_RES (4)..(4): Alpha-Me R8-octenyl-alanine olefin amino acids connected by an all-carbon i to i+7 crosslinker comprising one double bond
  MOD_RES (11)..(11): Alpha-Me S5-pentenyl-alanine olefin amino acids connected by an all-carbon i to i+4 crosslinker comprising one double bond
  C-term NH2
  Crosslinked Sequence
STFAAYWAQLAS

SEQ ID NO: 603 - protein, 12 aa, Artificial Sequence
  Description of Artificial Sequence: Synthetic peptide
  N-term Ac
  MOD_RES (4)..(4): Alpha-Me R8-octenyl-alanine olefin amino acids connected by an all-carbon i to i+7 crosslinker comprising one double bond
  MOD_RES (11)..(11): Alpha-Me S5-pentenyl-alanine olefin amino acids connected by an all-carbon i to i+4 crosslinker comprising one double bond
  C-term NH2
  Crosslinked Sequence
LTFAAYWAELAS

SEQ ID NO: 604 - protein, 12 aa, Artificial Sequence
  Description of Artificial Sequence: Synthetic peptide
  N-term Ac
  MOD_RES (4)..(4): Alpha-Me R8-octenyl-alanine olefin amino acids connected by an all-carbon i to i+7 crosslinker comprising one double bond
  MOD_RES (11)..(11): Alpha-Me S5-pentenyl-alanine olefin amino acids connected by an all-carbon i to i+4 crosslinker comprising one double bond
  C-term NH2
  Crosslinked Sequence
LTFAAYWAQLAE

SEQ ID NO: 605 - protein, 12 aa, Artificial Sequence
  Description of Artificial Sequence: Synthetic peptide
  N-term mdPEG3
  MOD_RES (4)..(4): Alpha-Me R8-octenyl-alanine olefin amino acids connected by an all-carbon i to i+7 crosslinker comprising one double bond
  MOD_RES (11)..(11): Alpha-Me S5-pentenyl-alanine olefin amino acids connected by an all-carbon i to i+4 crosslinker comprising one double bond
  C-term NH2
  Crosslinked Sequence
LTFAAYWAQLAS

SEQ ID NO: 606 - protein, 12 aa, Artificial Sequence
  Description of Artificial Sequence: Synthetic peptide
  N-term Ac
  MOD_RES (4)..(4): Alpha-Me R8-octenyl-alanine olefin amino acids connected by an all-carbon i to i+7 crosslinker comprising one double bond
  MOD_RES (10)..(10): Homo-Leu
  MOD_RES (11)..(11): Alpha-Me S5-pentenyl-alanine olefin amino acids connected by an all-carbon i to i+4 crosslinker comprising one double bond
  C-term NH2
  Crosslinked Sequence
LTFAAYWAQLAS

SEQ ID NO: 607 - protein, 12 aa, Artificial Sequence
  Description of Artificial Sequence: Synthetic peptide
  N-term Ac
  MOD_RES (4)..(4): Alpha-Me R8-octenyl-alanine olefin amino acids connected by an all-carbon i to i+7 crosslinker comprising one double bond
  MOD_RES (10)..(10): Cyclohexylalanine
  MOD_RES (11)..(11): Alpha-Me S5-pentenyl-alanine olefin amino acids connected by an all-carbon i to i+4 crosslinker comprising one double bond
  C-term NH2
  Crosslinked Sequence
LTFAAYWAQAAS

SEQ ID NO: 608 - protein, 12 aa, Artificial Sequence
  Description of Artificial Sequence: Synthetic peptide
  N-term Ac
  MOD_RES (4)..(4): Alpha-Me R8-octenyl-alanine olefin amino acids connected by an all-carbon i to i+7 crosslinker comprising one double bond
  MOD_RES (10)..(10): Cyclohexylglycine
  MOD_RES (11)..(11): Alpha-Me S5-pentenyl-alanine olefin amino acids connected by an all-carbon i to i+4 crosslinker comprising one double bond
  C-term NH2
  Crosslinked Sequence
LTFAAYWAQGAS

SEQ ID NO: 609 - protein, 12 aa, Artificial Sequence
  Description of Artificial Sequence: Synthetic peptide
  N-term Ac
  MOD_RES (4)..(4): Alpha-Me R8-octenyl-alanine olefin amino acids connected by an all-carbon i to i+7 crosslinker comprising one double bond
  MOD_RES (10)..(10): Cyclobutyl-Ala
  MOD_RES (11)..(11): Alpha-Me S5-pentenyl-alanine olefin amino acids connected by an all-carbon i to i+4 crosslinker comprising one double bond
  C-term NH2
  Crosslinked Sequence
LTFAAYWAQAAS

SEQ ID NO: 610 - protein, 12 aa, Artificial Sequence
  Description of Artificial Sequence: Synthetic peptide
  N-term Ac
  MOD_RES (4)..(4): Alpha-Me R8-octenyl-alanine olefin amino acids connected by an all-carbon i to i+7 crosslinker comprising one double bond
  MOD_RES (11)..(11): Alpha-Me S5-pentenyl-alanine olefin amino acids connected by an all-carbon i to i+4 crosslinker comprising one double bond
  C-term NH2
  Crosslinked Sequence
LTFAAYWAQFAS

SEQ ID NO: 611 - protein, 12 aa, Artificial Sequence
  Description of Artificial Sequence: Synthetic peptide
  N-term Ac
  MOD_RES (3)..(3): Phe-4F
  MOD_RES (4)..(4): Alpha-Me R8-octenyl-alanine olefin amino acids connected by an all-carbon i to i+7 crosslinker comprising one double bond
  MOD_RES (10)..(10): Homo-Leu
  MOD_RES (11)..(11): Alpha-Me S5-pentenyl-alanine olefin amino acids connected by an all-carbon i to i+4 crosslinker comprising one double bond
  C-term NH2
  Crosslinked Sequence
LTFAHYWAQLAS

SEQ ID NO: 612 - protein, 12 aa, Artificial Sequence
  Description of Artificial Sequence: Synthetic peptide
  N-term Ac
  MOD_RES (3)..(3): Phe-4F
  MOD_RES (4)..(4): Alpha-Me R8-octenyl-alanine olefin amino acids connected by an all-carbon i to i+7 crosslinker comprising one double bond
  MOD_RES (10)..(10): Cyclohexylalanine
  MOD_RES (11)..(11): Alpha-Me S5-pentenyl-alanine olefin amino acids connected by an all-carbon i to i+4 crosslinker comprising one double bond
  C-term NH2
  Crosslinked Sequence
LTFAHYWAQAAS

SEQ ID NO: 613 - protein, 12 aa, Artificial Sequence
  Description of Artificial Sequence: Synthetic peptide
  N-term Ac
  MOD_RES (3)..(3): Phe-4F
  MOD_RES (4)..(4): Alpha-Me R8-octenyl-alanine olefin amino acids connected by an all-carbon i to i+7 crosslinker comprising one double bond
  MOD_RES (10)..(10): Cyclohexylglycine
  MOD_RES (11)..(11): Alpha-Me S5-pentenyl-alanine olefin amino acids connected by an all-carbon i to i+4 crosslinker comprising one double bond
  C-term NH2
  Crosslinked Sequence
LTFAHYWAQGAS

SEQ ID NO: 614 - protein, 12 aa, Artificial Sequence
  Description of Artificial Sequence: Synthetic peptide
  N-term Ac
  MOD_RES (3)..(3): Phe-4F
  MOD_RES (4)..(4): Alpha-Me R8-octenyl-alanine olefin amino acids connected by an all-carbon i to i+7 crosslinker comprising one double bond
  MOD_RES (10)..(10): Cyclobutyl-Ala
  MOD_RES (11)..(11): Alpha-Me S5-pentenyl-alanine olefin amino acids connected by an all-carbon i to i+4 crosslinker comprising one double bond
  C-term NH2
  Crosslinked Sequence
LTFAHYWAQAAS

SEQ ID NO: 615 - protein, 12 aa, Artificial Sequence
  Description of Artificial Sequence: Synthetic peptide
  N-term Ac
  MOD_RES (3)..(3): Phe-4F
  MOD_RES (4)..(4): Alpha-Me R8-octenyl-alanine olefin amino acids connected by an all-carbon i to i+7 crosslinker comprising one double bond
  MOD_RES (10)..(10): Homo-Leu
  MOD_RES (11)..(11): Alpha-Me S5-pentenyl-alanine olefin amino acids connected by an all-carbon i to i+4 crosslinker comprising one double bond
  C-term NH2
  Crosslinked Sequence
LTFAAYWAQLAS

SEQ ID NO: 616 - protein, 12 aa, Artificial Sequence
  Description of Artificial Sequence: Synthetic peptide
  N-term Ac
  MOD_RES (3)..(3): Phe-4F
  MOD_RES (4)..(4): Alpha-Me R8-octenyl-alanine olefin amino acids connected by an all-carbon i to i+7 crosslinker comprising one double bond
  MOD_RES (10)..(10): Cyclohexylalanine
  MOD_RES (11)..(11): Alpha-Me S5-pentenyl-alanine olefin amino acids connected by an all-carbon i to i+4 crosslinker comprising one double bond
  C-term NH2
  Crosslinked Sequence
LTFAAYWAQAAS

SEQ ID NO: 617 - protein, 12 aa, Artificial Sequence
  Description of Artificial Sequence: Synthetic peptide
  N-term Ac
  MOD_RES (3)..(3): Phe-4F
  MOD_RES (4)..(4): Alpha-Me R8-octenyl-alanine olefin amino acids connected by an all-carbon i to i+7 crosslinker comprising one double bond
  MOD_RES (10)..(10): Cyclohexylglycine
  MOD_RES (11)..(11): Alpha-Me S5-pentenyl-alanine olefin amino acids connected by an all-carbon i to i+4 crosslinker comprising one double bond
  C-term NH2
  Crosslinked Sequence
LTFAAYWAQGAS

SEQ ID NO: 618 - protein, 12 aa, Artificial Sequence
  Description of Artificial Sequence: Synthetic peptide
  N-term Ac
  MOD_RES (3)..(3): Phe-4F
  MOD_RES (4)..(4): Alpha-Me R8-octenyl-alanine olefin amino acids connected by an all-carbon i to i+7 crosslinker comprising one double bond
  MOD_RES (10)..(10): Cyclobutyl-Ala
  MOD_RES (11)..(11): Alpha-Me S5-pentenyl-alanine olefin amino acids connected by an all-carbon i to i+4 crosslinker comprising one double bond
  C-term NH2
  Crosslinked Sequence
LTFAAYWAQAAS

SEQ ID NO: 619 - protein, 12 aa, Artificial Sequence
  Description of Artificial Sequence: Synthetic peptide
  N-term Ac
  MOD_RES (3)..(3): Phe-3Cl
  MOD_RES (4)..(4): Alpha-Me R8-octenyl-alanine olefin amino acids connected by an all-carbon i to i+7 crosslinker comprising one double bond
  MOD_RES (10)..(10): Homo-Leu
  MOD_RES (11)..(11): Alpha-Me S5-pentenyl-alanine olefin amino acids connected by an all-carbon i to i+4 crosslinker comprising one double bond
  C-term NH2
  Crosslinked Sequence
LTFAAYWAQLAS

SEQ ID NO: 620 - protein, 12 aa, Artificial Sequence
  Description of Artificial Sequence: Synthetic peptide
  N-term Ac
  MOD_RES (3)..(3): Phe-3Cl
  MOD_RES (4)..(4): Alpha-Me R8-octenyl-alanine olefin amino acids connected by an all-carbon i to i+7 crosslinker comprising one double bond
  MOD_RES (10)..(10): Cyclohexylalanine
  MOD_RES (11)..(11): Alpha-Me S5-pentenyl-alanine olefin amino acids connected by an all-carbon i to i+4 crosslinker comprising one double bond
  C-term NH2
  Crosslinked Sequence
LTFAAYWAQAAS

SEQ ID NO: 621 - protein, 12 aa, Artificial Sequence
  Description of Artificial Sequence: Synthetic peptide
  N-term Ac
  MOD_RES (3)..(3): Phe-3Cl
  MOD_RES (4)..(4): Alpha-Me R8-octenyl-alanine olefin amino acids connected by an all-carbon i to i+7 crosslinker comprising one double bond
  MOD_RES (10)..(10): Cyclohexylglycine
  MOD_RES (11)..(11): Alpha-Me S5-pentenyl-alanine olefin amino acids connected by an all-carbon i to i+4 crosslinker comprising one double bond
  C-term NH2
  Crosslinked Sequence
LTFAAYWAQGAS

SEQ ID NO: 622 - protein, 12 aa, Artificial Sequence
  Description of Artificial Sequence: Synthetic peptide
  N-term Ac
  MOD_RES (3)..(3): Phe-3Cl
  MOD_RES (4)..(4): Alpha-Me R8-octenyl-alanine olefin amino acids connected by an all-carbon i to i+7 crosslinker comprising one double bond
  MOD_RES (10)..(10): Cyclobutyl-Ala
  MOD_RES (11)..(11): Alpha-Me S5-pentenyl-alanine olefin amino acids connected by an all-carbon i to i+4 crosslinker comprising one double bond
  C-term NH2
  Crosslinked Sequence
LTFAAYWAQAAS

SEQ ID NO: 623 - protein, 12 aa, Artificial Sequence
  Description of Artificial Sequence: Synthetic peptide
  N-term Ac
  MOD_RES (4)..(4): Alpha-Me R8-octenyl-alanine olefin amino acids connected by an all-carbon i to i+7 crosslinker comprising one double bond
  MOD_RES (10)..(10): Homo-Phe
  MOD_RES (11)..(11): Alpha-Me S5-pentenyl-alanine olefin amino acids connected by an all-carbon i to i+4 crosslinker comprising one double bond
  C-term NH2
  Crosslinked Sequence
LTFAAYWAQFAS

SEQ ID NO: 624 - protein, 12 aa, Artificial Sequence
  Description of Artificial Sequence: Synthetic peptide
  N-term Ac
  MOD_RES (4)..(4): Alpha-Me R8-octenyl-alanine olefin amino acids connected by an all-carbon i to i+7 crosslinker comprising one double bond
  MOD_RES (10)..(10): Phe-3CF3
  MOD_RES (11)..(11): Alpha-Me S5-pentenyl-alanine olefin amino acids connected by an all-carbon i to i+4 crosslinker comprising one double bond
  C-term NH2
  Crosslinked Sequence
LTFAAYWAQFAS

SEQ ID NO: 625 - protein, 12 aa, Artificial Sequence
  Description of Artificial Sequence: Synthetic peptide
  N-term Ac
  MOD_RES (4)..(4): Alpha-Me R8-octenyl-alanine olefin amino acids connected by an all-carbon i to i+7 crosslinker comprising one double bond
  MOD_RES (10)..(10): Phe-3Me
  MOD_RES (11)..(11): Alpha-Me S5-pentenyl-alanine olefin amino acids connected by an all-carbon i to i+4 crosslinker comprising one double bond
  C-term NH2
  Crosslinked Sequence
LTFAAYWAQFAS

SEQ ID NO: 626 - protein, 12 aa, Artificial Sequence
  Description of Artificial Sequence: Synthetic peptide
  N-term Ac
  MOD_RES (4)..(4): Alpha-Me R8-octenyl-alanine olefin amino acids connected by an all-carbon i to i+7 crosslinker comprising one double bond
  MOD_RES (10)..(10): 1-Naphthylalanine
  MOD_RES (11)..(11): Alpha-Me S5-pentenyl-alanine olefin amino acids connected by an all-carbon i to i+4 crosslinker comprising one double bond
  C-term NH2
  Crosslinked Sequence
LTFAAYWAQAAS

SEQ ID NO: 627 - protein, 12 aa, Artificial Sequence
  Description of Artificial Sequence: Synthetic peptide
  N-term Ac
  MOD_RES (4)..(4): Alpha-Me R8-octenyl-alanine olefin amino acids connected by an all-carbon i to i+7 crosslinker comprising one double bond
  MOD_RES (10)..(10): Biphenylalanine
  MOD_RES (11)..(11): Alpha-Me S5-pentenyl-alanine olefin amino acids connected by an all-carbon i to i+4 crosslinker comprising one double bond
  C-term NH2
  Crosslinked Sequence
LTFAAYWAQFAS

SEQ ID NO: 628 - protein, 12 aa, Artificial Sequence
  Description of Artificial Sequence: Synthetic peptide
  N-term Ac
  MOD_RES (4)..(4): Alpha-Me R8-octenyl-alanine olefin amino acids connected by an all-carbon i to i+7 crosslinker comprising one double bond
  MOD_RES (11)..(11): Alpha-Me S5-pentenyl-alanine olefin amino acids connected by an all-carbon i to i+4 crosslinker comprising one double bond
  C-term NH2
  Crosslinked Sequence
LTFAFYWAQLAA

SEQ ID NO: 629 - protein, 12 aa, Artificial Sequence
  Description of Artificial Sequence: Synthetic peptide
  N-term Ac
  MOD_RES (4)..(4): Alpha-Me R8-octenyl-alanine olefin amino acids connected by an all-carbon i to i+7 crosslinker comprising one double bond
  MOD_RES (11)..(11): Alpha-Me S5-pentenyl-alanine olefin amino acids connected by an all-carbon i to i+4 crosslinker comprising one double bond
  C-term NHAm
  Crosslinked Sequence
LTFAHYWAQLAS

SEQ ID NO: 630 - protein, 12 aa, Artificial Sequence
  Description of Artificial Sequence: Synthetic peptide
  N-term Ac
  MOD_RES (4)..(4): Alpha-Me R8-octenyl-alanine olefin amino acids connected by an all-carbon i to i+7 crosslinker comprising one double bond
  MOD_RES (11)..(11): Alpha-Me S5-pentenyl-alanine olefin amino acids connected by an all-carbon i to i+4 crosslinker comprising one double bond
  C-term NHiAm
  Crosslinked Sequence
LTFAHYWAQLAS

SEQ ID NO: 631 - protein, 12 aa, Artificial Sequence
  Description of Artificial Sequence: Synthetic peptide
  N-term Ac
  MOD_RES (4)..(4): Alpha-Me R8-octenyl-alanine olefin amino acids connected by an all-carbon i to i+7 crosslinker comprising one double bond
  MOD_RES (11)..(11): Alpha-Me S5-pentenyl-alanine olefin amino acids connected by an all-carbon i to i+4 crosslinker comprising one double bond
  C-term NHnPr3Ph
  Crosslinked Sequence
LTFAHYWAQLAS

SEQ ID NO: 632 - protein, 12 aa, Artificial Sequence
  Description of Artificial Sequence: Synthetic peptide
  N-term Ac
  MOD_RES (4)..(4): Alpha-Me R8-octenyl-alanine olefin amino acids connected by an all-carbon i to i+7 crosslinker comprising one double bond
  MOD_RES (11)..(11): Alpha-Me S5-pentenyl-alanine olefin amino acids connected by an all-carbon i to i+4 crosslinker comprising one double bond
  C-term NHnBu3,3Me
  Crosslinked Sequence
LTFAHYWAQLAS

SEQ ID NO: 633 - protein, 12 aa, Artificial Sequence
  Description of Artificial Sequence: Synthetic peptide
  N-term Ac
  MOD_RES (4)..(4): Alpha-Me R8-octenyl-alanine olefin amino acids connected by an all-carbon i to i+7 crosslinker comprising one double bond
  MOD_RES (11)..(11): Alpha-Me S5-pentenyl-alanine olefin amino acids connected by an all-carbon i to i+4 crosslinker comprising one double bond
  C-term NHnPr
  Crosslinked Sequence
LTFAHYWAQLAS

SEQ ID NO: 634 - protein, 12 aa, Artificial Sequence
  Description of Artificial Sequence: Synthetic peptide
  N-term Ac
  MOD_RES (4)..(4): Alpha-Me R8-octenyl-alanine olefin amino acids connected by an all-carbon i to i+7 crosslinker comprising one double bond
  MOD_RES (11)..(11): Alpha-Me S5-pentenyl-alanine olefin amino acids connected by an all-carbon i to i+4 crosslinker comprising one double bond
  C-term NHnEt2Ch
  Crosslinked Sequence
LTFAHYWAQLAS

SEQ ID NO: 635 - protein, 12 aa, Artificial Sequence
  Description of Artificial Sequence: Synthetic peptide
  N-term Ac
  MOD_RES (4)..(4): Alpha-Me R8-octenyl-alanine olefin amino acids connected by an all-carbon i to i+7 crosslinker comprising one double bond
  MOD_RES (11)..(11): Alpha-Me S5-pentenyl-alanine olefin amino acids connected by an all-carbon i to i+4 crosslinker comprising one double bond
  C-term NHHex
  Crosslinked Sequence
LTFAHYWAQLAS

SEQ ID NO: 636 - protein, 12 aa, Artificial Sequence
  Description of Artificial Sequence: Synthetic peptide
  N-term Ac
  MOD_RES (4)..(4): Alpha-Me R8-octenyl-alanine olefin amino acids connected by an all-carbon i to i+7 crosslinker comprising one double bond
  MOD_RES (11)..(11): Alpha-Me S5-pentenyl-alanine olefin amino acids connected by an all-carbon i to i+4 crosslinker comprising one double bond
  C-term NHmdPeg2
  Crosslinked Sequence
LTFAAYWAQLAS

SEQ ID NO: 637 - protein, 12 aa, Artificial Sequence
  Description of Artificial Sequence: Synthetic peptide
  N-term Ac
  MOD_RES (4)..(4): Alpha-Me R8-octenyl-alanine olefin amino acids connected by an all-carbon i to i+7 crosslinker comprising one double bond
  MOD_RES (11)..(11): Alpha-Me S5-pentenyl-alanine olefin amino acids connected by an all-carbon i to i+4 crosslinker comprising one double bond
  C-term NHmdPeg2
  Crosslinked Sequence
LTFAAYWAQLAA

SEQ ID NO: 638 - protein, 12 aa, Artificial Sequence
  Description of Artificial Sequence: Synthetic peptide
  N-term Ac
  MOD_RES (4)..(4): Alpha-Me R8-octenyl-alanine olefin amino acids connected by an all-carbon i to i+7 crosslinker comprising one double bond
  MOD_RES (11)..(11): Alpha-Me S5-pentenyl-alanine olefin amino acids connected by an all-carbon i to i+4 crosslinker comprising one double bond
  C-term NHmdPeg4
  Crosslinked Sequence
LTFAAYWAQLAA

SEQ ID NO: 639 - protein, 10 aa, Artificial Sequence
  Description of Artificial Sequence: Synthetic peptide
  N-term Ac
  MOD_RES (2)..(2): Alpha-Me R8-octenyl-alanine olefin amino acids connected by an all-carbon i to i+7 crosslinker comprising one double bond
  MOD_RES (5)..(5): dl4m-Trp
  MOD_RES (9)..(9): Alpha-Me S5-pentenyl-alanine olefin amino acids connected by an all-carbon i to i+4 crosslinker comprising one double bond
  C-term NH2
  Crosslinked Sequence
FAAYWEALAA

SEQ ID NO: 640 - protein, 10 aa, Artificial Sequence
  Description of Artificial Sequence: Synthetic peptide
  N-term Ac
  MOD_RES (2)..(2): Alpha-Me R8-octenyl-alanine olefin amino acids connected by an all-carbon i to i+7 crosslinker comprising one double bond
  MOD_RES (5)..(5): dl5cl-Trp
  MOD_RES (9)..(9): Alpha-Me S5-pentenyl-alanine olefin amino acids connected by an all-carbon i to i+4 crosslinker comprising one double bond
  C-term NH2
  Crosslinked Sequence
FAAYWEALAA

SEQ ID NO: 641 - protein, 12 aa, Artificial Sequence
  Description of Artificial Sequence: Synthetic peptide
  N-term Ac
  MOD_RES (3)..(3): Homo-Phe
  MOD_RES (4)..(4): Alpha-Me R8-octenyl-alanine olefin amino acids connected by an all-carbon i to i+7 crosslinker comprising one double bond
  MOD_RES (11)..(11): Alpha-Me S5-pentenyl-alanine olefin amino acids connected by an all-carbon i to i+4 crosslinker comprising one double bond
  C-term NH2
  Crosslinked Sequence
LTFAAYWAQLAS

SEQ ID NO: 642 - protein, 12 aa, Artificial Sequence
  Description of Artificial Sequence: Synthetic peptide
  N-term Ac
  MOD_RES (3)..(3): 2-Naphthylalanine
  MOD_RES (4)..(4): Alpha-Me R8-octenyl-alanine olefin amino acids connected by an all-carbon i to i+7 crosslinker comprising one double bond
  MOD_RES (11)..(11): Alpha-Me S5-pentenyl-alanine olefin amino acids connected by an all-carbon i to i+4 crosslinker comprising one double bond
  C-term NH2
  Crosslinked Sequence
LTAAAYWAQLAS

SEQ ID NO: 643 - protein, 12 aa, Artificial Sequence
  Description of Artificial Sequence: Synthetic peptide
  N-term Ac
  MOD_RES (4)..(4): Alpha-Me R8-octenyl-alanine olefin amino acids connected by an all-carbon i to i+7 crosslinker comprising one double bond
  MOD_RES (11)..(11): Alpha-Me S5-pentenyl-alanine olefin amino acids connected by an all-carbon i to i+4 crosslinker comprising one double bond
  C-term NH2
  Crosslinked Sequence
LTAAAYWAQLAS

SEQ ID NO: 644 - protein, 12 aa, Artificial Sequence
  Description of Artificial Sequence: Synthetic peptide
  N-term Ac
  MOD_RES (4)..(4): Alpha-Me R8-octenyl-alanine olefin amino acids connected by an all-carbon i to i+7 crosslinker comprising one double bond
  MOD_RES (11)..(11): Alpha-Me S5-pentenyl-alanine olefin amino acids connected by an all-carbon i to i+4 crosslinker comprising one double bond
  C-term NH2
  Crosslinked Sequence
LTFAAYWVQLAS

SEQ ID NO: 645 - protein, 12 aa, Artificial Sequence
  Description of Artificial Sequence: Synthetic peptide
  N-term Ac
  MOD_RES (4)..(4): Alpha-Me R8-octenyl-alanine olefin amino acids connected by an all-carbon i to i+7 crosslinker comprising one double bond
  MOD_RES (11)..(11): Alpha-Me S5-pentenyl-alanine olefin amino acids connected by an all-carbon i to i+4 crosslinker comprising one double bond
  C-term NH2
  Crosslinked Sequence
LTFAHYWAALAA

SEQ ID NO: 646 - protein, 12 aa, Artificial Sequence
  Description of Artificial Sequence: Synthetic peptide
  N-term Ac
  MOD_RES (4)..(4): Alpha-Me R8-octenyl-alanine olefin amino acids connected by an all-carbon i to i+7 crosslinker comprising one double bond
  MOD_RES (11)..(11): Alpha-Me S5-pentenyl-alanine olefin amino acids connected by an all-carbon i to i+4 crosslinker comprising one double bond
  C-term NH2
  Crosslinked Sequence
LTFAVYWAQLAA

SEQ ID NO: 647 - protein, 12 aa, Artificial Sequence
  Description of Artificial Sequence: Synthetic peptide
  N-term Ac
  MOD_RES (4)..(4): Alpha-Me R8-octenyl-alanine olefin amino acids connected by an all-carbon i to i+7 crosslinker comprising one double bond
  MOD_RES (11)..(11): Alpha-Me S5-pentenyl-alanine olefin amino acids connected by an all-carbon i to i+4 crosslinker comprising one double bond
  C-term NH2
  Crosslinked Sequence
LTFAIYWAQLAS

SEQ ID NO: 648 - protein, 12 aa, Artificial Sequence
  Description of Artificial Sequence: Synthetic peptide
  N-term Ac
  MOD_RES (4)..(4): Alpha-Me R8-octenyl-alanine olefin amino acids connected by an all-carbon i to i+7 crosslinker comprising one double bond
  MOD_RES (11)..(11): Alpha-Me S5-pentenyl-alanine olefin amino acids connected by an all-carbon i to i+4 crosslinker comprising one double bond
  C-term NH2
  Crosslinked Sequence
FTFAVYWSQLAS

SEQ ID NO: 649 - protein, 12 aa, Artificial Sequence
  Description of Artificial Sequence: Synthetic peptide
  N-term Ac
  MOD_RES (4)..(4): Alpha-Me R8-octenyl-alanine olefin amino acids connected by an all-carbon i to i+7 crosslinker comprising one double bond
  MOD_RES (11)..(11): Alpha-Me S5-pentenyl-alanine olefin amino acids connected by an all-carbon i to i+4 crosslinker comprising one double bond
  C-term NH2
  Crosslinked Sequence
ITFAFYWAQLAS

SEQ ID NO: 650 - protein, 12 aa, Artificial Sequence
  Description of Artificial Sequence: Synthetic peptide
  N-term Ac
  MOD_RES (1)..(1): 2-Naphthylalanine
  MOD_RES (4)..(4): Alpha-Me R8-octenyl-alanine olefin amino acids connected by an all-carbon i to i+7 crosslinker comprising one double bond
  MOD_RES (11)..(11): Alpha-Me S5-pentenyl-alanine olefin amino acids connected by an all-carbon i to i+4 crosslinker comprising one double bond
  C-term NH2
  Crosslinked Sequence
ATFAVYWSQLAS

SEQ ID NO: 651 - protein, 12 aa, Artificial Sequence
  Description of Artificial Sequence: Synthetic peptide
  N-term Ac
  MOD_RES (4)..(4): Alpha-Me R8-octenyl-alanine olefin amino acids connected by an all-carbon i to i+7 crosslinker comprising one double bond
  MOD_RES (11)..(11): Alpha-Me S5-pentenyl-alanine olefin amino acids connected by an all-carbon i to i+4 crosslinker comprising one double bond
  C-term NH2
  Crosslinked Sequence
ITFALYWSQLAS

SEQ ID NO: 652 - protein, 12 aa, Artificial Sequence
  Description of Artificial Sequence: Synthetic peptide
  N-term Ac
  MOD_RES (4)..(4): Alpha-Me R8-octenyl-alanine olefin amino acids connected by an all-carbon i to i+7 crosslinker comprising one double bond
  MOD_RES (11)..(11): Alpha-Me S5-pentenyl-alanine olefin amino acids connected by an all-carbon i to i+4 crosslinker comprising one double bond
  C-term NH2
  Crosslinked Sequence
FTFAFYWAQLAS

SEQ ID NO: 653 - protein, 12 aa, Artificial Sequence
  Description of Artificial Sequence: Synthetic peptide
  N-term Ac
  MOD_RES (4)..(4): Alpha-Me R8-octenyl-alanine olefin amino acids connected by an all-carbon i to i+7 crosslinker comprising one double bond
  MOD_RES (11)..(11): Alpha-Me S5-pentenyl-alanine olefin amino acids connected by an all-carbon i to i+4 crosslinker comprising one double bond
  C-term NH2
  Crosslinked Sequence
WTFAVYWAQLAS

SEQ ID NO: 654 - protein, 12 aa, Artificial Sequence
  Description of Artificial Sequence: Synthetic peptide
  N-term Ac
  MOD_RES (4)..(4): Alpha-Me R8-octenyl-alanine olefin amino acids connected by an all-carbon i to i+7 crosslinker comprising one double bond
  MOD_RES (11)..(11): Alpha-Me S5-pentenyl-alanine olefin amino acids connected by an all-carbon i to i+4 crosslinker comprising one double bond
  C-term NH2
  Crosslinked Sequence
WTFAWYWAQLAS

SEQ ID NO: 655 - protein, 12 aa, Artificial Sequence
  Description of Artificial Sequence: Synthetic peptide
  N-term Ac
  MOD_RES (4)..(4): Alpha-Me R8-octenyl-alanine olefin amino acids connected by an all-carbon i to i+7 crosslinker comprising one double bond
  MOD_RES (11)..(11): Alpha-Me S5-pentenyl-alanine olefin amino acids connected by an all-carbon i to i+4 crosslinker comprising one double bond
  C-term NH2
  Crosslinked Sequence
VTFAAYWSQLAS

SEQ ID NO: 656 - protein, 12 aa, Artificial Sequence
  Description of Artificial Sequence: Synthetic peptide
  N-term Ac
  MOD_RES (4)..(4): Alpha-Me R8-octenyl-alanine olefin amino acids connected by an all-carbon i to i+7 crosslinker comprising one double bond
  MOD_RES (11)..(11): Alpha-Me S5-pentenyl-alanine olefin amino acids connected by an all-carbon i to i+4 crosslinker comprising one double bond
  C-term NH2
  Crosslinked Sequence
WTFAFYWSQLAS

SEQ ID NO: 657 - protein, 12 aa, Artificial Sequence
  Description of Artificial Sequence: Synthetic peptide
  N-term Ac
  MOD_RES (4)..(4): Alpha-Me R8-octenyl-alanine olefin amino acids connected by an all-carbon i to i+7 crosslinker comprising one double bond
  MOD_RES (11)..(11): Alpha-Me S5-pentenyl-alanine olefin amino acids connected by an all-carbon i to i+4 crosslinker comprising one double bond
  C-term NH2
  Crosslinked Sequence
FTFAIYWAQLAS

SEQ ID NO: 658 - protein, 12 aa, Artificial Sequence
  Description of Artificial Sequence: Synthetic peptide
  N-term Ac
  MOD_RES (4)..(4): Alpha-Me R8-octenyl-alanine olefin amino acids connected by an all-carbon i to i+7 crosslinker comprising one double bond
  MOD_RES (11)..(11): Alpha-Me S5-pentenyl-alanine olefin amino acids connected by an all-carbon i to i+4 crosslinker comprising one double bond
  C-term NH2
  Crosslinked Sequence
WTFAVYWSQLAS

SEQ ID NO: 659 - protein, 12 aa, Artificial Sequence
  Description of Artificial Sequence: Synthetic peptide
  N-term Ac
  MOD_RES (4)..(4): Alpha-Me R8-octenyl-alanine olefin amino acids connected by an all-carbon i to i+7 crosslinker comprising one double bond
  MOD_RES (11)..(11): Alpha-Me S5-pentenyl-alanine olefin amino acids connected by an all-carbon i to i+4 crosslinker comprising one double bond
  C-term NH2
  Crosslinked Sequence
FTFALYWSQLAS

SEQ ID NO: 660 - protein, 12 aa, Artificial Sequence
  Description of Artificial Sequence: Synthetic peptide
  N-term Ac
  MOD_RES (4)..(4): Alpha-Me R8-octenyl-alanine olefin amino acids connected by an all-carbon i to i+7 crosslinker comprising one double bond
  MOD_RES (11)..(11): Alpha-Me S5-pentenyl-alanine olefin amino acids connected by an all-carbon i to i+4 crosslinker comprising one double bond
  C-term NH2
  Crosslinked Sequence
YTFAFYWSQLAS

SEQ ID NO: 661 - protein, 12 aa, Artificial Sequence
  Description of Artificial Sequence: Synthetic peptide
  N-term Ac
  MOD_RES (4)..(4): Alpha-Me R8-octenyl-alanine olefin amino acids connected by an all-carbon i to i+7 crosslinker comprising one double bond
  MOD_RES (7)..(7): 6cl-Trp
  MOD_RES (11)..(11): Alpha-Me S5-pentenyl-alanine olefin amino acids connected by an all-carbon i to i+4 crosslinker comprising one double bond
  C-term NH2
  Crosslinked Sequence
LTFAAYWEALAA

SEQ ID NO: 662 - protein, 12 aa, Artificial Sequence
  Description of Artificial Sequence: Synthetic peptide
  N-term Ac
  MOD_RES (4)..(4): Alpha-Me R8-octenyl-alanine olefin amino acids connected by an all-carbon i to i+7 crosslinker comprising one double bond
  MOD_RES (7)..(7): 6cl-Trp
  MOD_RES (11)..(11): Alpha-Me S5-pentenyl-alanine olefin amino acids connected by an all-carbon i to i+4 crosslinker comprising one double bond
  C-term NH2
  Crosslinked Sequence
LTFAAYWSQLAS

SEQ ID NO: 663 - protein, 10 aa, Artificial Sequence
  Description of Artificial Sequence: Synthetic peptide
  N-term Ac
  MOD_RES (2)..(2): Alpha-Me R8-octenyl-alanine olefin amino acids connected by an all-carbon i to i+7 crosslinker comprising one double bond
  MOD_RES (5)..(5): 6cl-Trp
  MOD_RES (9)..(9): Alpha-Me S5-pentenyl-alanine olefin amino acids connected by an all-carbon i to i+4 crosslinker comprising one double bond
  C-term NH2
  Crosslinked Sequence
FAAYWSALAA

SEQ ID NO: 664 - protein, 11 aa, Artificial Sequence
  Description of Artificial Sequence: Synthetic peptide
  N-term Ac
  MOD_RES (2)..(2): Alpha-Me R8-octenyl-alanine olefin amino acids connected by an all-carbon i to i+7 crosslinker comprising one double bond
  MOD_RES (5)..(5): 6cl-Trp
  MOD_RES (9)..(9): Alpha-Me S5-pentenyl-alanine olefin amino acids connected by an all-carbon i to i+4 crosslinker comprising one double bond
  C-term NH2
  Crosslinked Sequence
FAAYWQALAAA

SEQ ID NO: 665 - protein, 12 aa, Artificial Sequence
  Description of Artificial Sequence: Synthetic peptide
  N-term Ac
  MOD_RES (4)..(4): Alpha-Me R8-octenyl-alanine olefin amino acids connected by an all-carbon i to i+7 crosslinker comprising one double bond
  MOD_RES (11)..(11): Alpha-Me S5-pentenyl-alanine olefin amino acids connected by an all-carbon i to i+4 crosslinker comprising one double bond
  C-term NH2
  Crosslinked Sequence
LHFAAYWAQLAS

SEQ ID NO: 666 - protein, 12 aa, Artificial Sequence
  Description of Artificial Sequence: Synthetic peptide
  N-term Ac
  MOD_RES (4)..(4): Alpha-Me R8-octenyl-alanine olefin amino acids connected by an all-carbon i to i+7 crosslinker comprising one double bond
  MOD_RES (11)..(11): Alpha-Me S5-pentenyl-alanine olefin amino acids connected by an all-carbon i to i+4 crosslinker comprising one double bond
  C-term NH2
  Crosslinked Sequence
LTFAAYWAQLAS

SEQ ID NO: 667 - protein, 12 aa, Artificial Sequence
  Description of Artificial Sequence: Synthetic peptide
  N-term Ac
  MOD_RES (4)..(4): Alpha-Me R8-octenyl-alanine olefin amino acids connected by an all-carbon i to i+7 crosslinker comprising one double bond
  MOD_RES (11)..(11): Alpha-Me S5-pentenyl-alanine olefin amino acids connected by an all-carbon i to i+4 crosslinker comprising one double bond
  C-term NH2
  Crosslinked Sequence
LTFAAHWAQLAS

SEQ ID NO: 668 - protein, 12 aa, Artificial Sequence
  Description of Artificial Sequence: Synthetic peptide
  N-term Ac
  MOD_RES (4)..(4): Alpha-Me R8-octenyl-alanine olefin amino acids connected by an all-carbon i to i+7 crosslinker comprising one double bond
  MOD_RES (11)..(11): Alpha-Me S5-pentenyl-alanine olefin amino acids connected by an all-carbon i to i+4 crosslinker comprising one double bond
  C-term NH2
  Crosslinked Sequence
LTFAAYWAHLAS

SEQ ID NO: 669 - protein, 12 aa, Artificial Sequence
  Description of Artificial Sequence: Synthetic peptide
  N-term Ac
  MOD_RES (4)..(4): Alpha-Me R8-octenyl-alanine olefin amino acids connected by an all-carbon i to i+7 crosslinker comprising one double bond
  MOD_RES (11)..(11): Alpha-Me S5-pentenyl-alanine olefin amino acids connected by an all-carbon i to i+4 crosslinker comprising one double bond
  C-term NH2
  Crosslinked Sequence
LTFAAYWAQLAH

SEQ ID NO: 670 - protein, 12 aa, Artificial Sequence
  Description of Artificial Sequence: Synthetic peptide
  N-term H
  MOD_RES (4)..(4): Alpha-Me R8-octenyl-alanine olefin amino acids connected by an all-carbon i to i+7 crosslinker comprising one double bond
  MOD_RES (11)..(11): Alpha-Me S5-pentenyl-alanine olefin amino acids connected by an all-carbon i to i+4 crosslinker comprising one double bond
  C-term NH2
  Crosslinked Sequence
LTFAAYWAQLAA

SEQ ID NO: 671 - protein, 12 aa, Artificial Sequence
  Description of Artificial Sequence: Synthetic peptide
  N-term Ac
  MOD_RES (4)..(4): Alpha-Me R8-octenyl-alanine olefin amino acids connected by an all-carbon i to i+7 crosslinker comprising one double bond
  MOD_RES (11)..(11): Alpha-Me S5-pentenyl-alanine olefin amino acids connected by an all-carbon i to i+4 crosslinker comprising one double bond
  C-term NH2
  Crosslinked Sequence
HHFAAYWAQLAS

SEQ ID NO: 672 - protein, 14 aa, Artificial Sequence
  Description of Artificial Sequence: Synthetic peptide
  N-term Ac
  MOD_RES (1)..(1): D-Ala
  MOD_RES (2)..(2): 2-aminoisobutyric acid
  MOD_RES (6)..(6): Alpha-Me R8-octenyl-alanine olefin amino acids connected by an all-carbon i to i+7 crosslinker comprising one double bond
  MOD_RES (13)..(13): Alpha-Me S5-pentenyl-alanine olefin amino acids connected by an all-carbon i to i+4 crosslinker comprising one double bond
  C-term NH2
  Crosslinked Sequence
AXWTFAVYWSQLAS

SEQ ID NO: 673 - protein, 13 aa, Artificial Sequence
  Description of Artificial Sequence: Synthetic peptide
  N-term Ac
  MOD_RES (1)..(1): 2-aminoisobutyric acid
  MOD_RES (5)..(5): Alpha-Me R8-octenyl-alanine olefin amino acids connected by an all-carbon i to i+7 crosslinker comprising one double bond
  MOD_RES (12)..(12): Alpha-Me S5-pentenyl-alanine olefin amino acids connected by an all-carbon i to i+4 crosslinker comprising one double bond
  C-term NH2
  Crosslinked Sequence
XWTFAHYWAQLAS

SEQ ID NO: 674 - protein, 14 aa, Artificial Sequence
  Description of Artificial Sequence: Synthetic peptide
  N-term Ac
  MOD_RES (1)..(1): 2-aminoisobutyric acid
  MOD_RES (6)..(6): Alpha-Me R8-octenyl-alanine olefin amino acids connected by an all-carbon i to i+7 crosslinker comprising one double bond
  MOD_RES (13)..(13): Alpha-Me S5-pentenyl-alanine olefin amino acids connected by an all-carbon i to i+4 crosslinker comprising one double bond
  C-term NH2
  Crosslinked Sequence
XAWTFAHYWAQLAS

SEQ ID NO: 675 - protein, 13 aa, Artificial Sequence
  Description of Artificial Sequence: Synthetic peptide
  N-term Ac
  MOD_RES (1)..(1): D-Phe
  MOD_RES (5)..(5): Alpha-Me R8-octenyl-alanine olefin amino acids connected by an all-carbon i to i+7 crosslinker comprising one double bond
  MOD_RES (12)..(12): Alpha-Me S5-pentenyl-alanine olefin amino acids connected by an all-carbon i to i+4 crosslinker comprising one double bond
  C-term NH2
  Crosslinked Sequence
FWTFAHYWAQLAS

SEQ ID NO: 676 - protein, 14 aa, Artificial Sequence
  Description of Artificial Sequence: Synthetic peptide
  N-term Ac
  MOD_RES (1)..(1): 2-aminoisobutyric acid
  MOD_RES (6)..(6): Alpha-Me R8-octenyl-alanine olefin amino acids connected by an all-carbon i to i+7 crosslinker comprising one double bond
  MOD_RES (13)..(13): Alpha-Me S5-pentenyl-alanine olefin amino acids connected by an all-carbon i to i+4 crosslinker comprising one double bond
  C-term NH2
  Crosslinked Sequence
XWWTFAHYWAQLAS

SEQ ID NO: 677 - protein, 12 aa, Artificial Sequence
  Description of Artificial Sequence: Synthetic peptide
  N-term Ac
  MOD_RES (4)..(4): Alpha-Me R8-octenyl-alanine olefin amino acids connected by an all-carbon i to i+7 crosslinker comprising one double bond
  MOD_RES (11)..(11): Alpha-Me S5-pentenyl-alanine olefin amino acids connected by an all-carbon i to i+4 crosslinker comprising one double bond
  C-term NH2
  Crosslinked Sequence
WTFALYWSQLAS

SEQ ID NO: 678 - protein, 12 aa, Artificial Sequence
  Description of Artificial Sequence: Synthetic peptide
  N-term Ac
  MOD_RES (4)..(4): Alpha-Me R8-octenyl-alanine olefin amino acids connected by an all-carbon i to i+7 crosslinker comprising one double bond
  MOD_RES (5)..(5): Norleucine
  MOD_RES (11)..(11): Alpha-Me S5-pentenyl-alanine olefin amino acids connected by an all-carbon i to i+4 crosslinker comprising one double bond
  C-term NH2
  Crosslinked Sequence
WTFALYWSQLAS

SEQ ID NO: 679 - protein, 12 aa, Artificial Sequence
  Description of Artificial Sequence: Synthetic peptide
  N-term Ac
  MOD_RES (4)..(4): Alpha-Me R8-octenyl-alanine olefin amino acids connected by an all-carbon i to i+7 crosslinker comprising one double bond
  MOD_RES (11)..(11): Alpha-Me S5-pentenyl-alanine olefin amino acids connected by an all-carbon i to i+4 crosslinker comprising one double bond
  MOD_RES (12)..(12): D-Ala
  C-term NH2
  Crosslinked Sequence
LTFAAYWSQLAA

SEQ ID NO: 680 - protein, 12 aa, Artificial Sequence
  Description of Artificial Sequence: Synthetic peptide
  N-term Ac
  MOD_RES (4)..(4): Alpha-Me R8-octenyl-alanine olefin amino acids connected by an all-carbon i to i+7 crosslinker comprising one double bond
  MOD_RES (11)..(11): Alpha-Me S5-pentenyl-alanine olefin amino acids connected by an all-carbon i to i+4 crosslinker comprising one double bond
  C-term NH2
  Crosslinked Sequence
LTFAEYWARLAA

SEQ ID NO: 681 - protein, 12 aa, Artificial Sequence
  Description of Artificial Sequence: Synthetic peptide
  N-term Ac
  MOD_RES (4)..(4): Alpha-Me R8-octenyl-alanine olefin amino acids connected by an all-carbon i to i+7 crosslinker comprising one double bond
  MOD_RES (11)..(11): Alpha-Me S5-pentenyl-alanine olefin amino acids connected by an all-carbon i to i+4 crosslinker comprising one double bond
  C-term NH2
  Crosslinked Sequence
LTFAEYWAHLAA

SEQ ID NO: 682 - protein, 12 aa, Artificial Sequence
  Description of Artificial Sequence: Synthetic peptide
  N-term Ac
  MOD_RES (1)..(1): D-Ala
  MOD_RES (4)..(4): Alpha-Me R8-octenyl-alanine olefin amino acids connected by an all-carbon i to i+7 crosslinker comprising one double bond
  MOD_RES (11)..(11): Alpha-Me S5-pentenyl-alanine olefin amino acids connected by an all-carbon i to i+4 crosslinker comprising one double bond
  C-term NH2
  Crosslinked Sequence
ATFAAYWAQLAS

SEQ ID NO: 683 - protein, 12 aa, Artificial Sequence
  Description of Artificial Sequence: Synthetic peptide
  N-term Ac
  MOD_RES (1)..(1): 2-aminoisobutyric acid
  MOD_RES (4)..(4): Alpha-Me R8-octenyl-alanine olefin amino acids connected by an all-carbon i to i+7 crosslinker comprising one double bond
  MOD_RES (11)..(11): Alpha-Me S5-pentenyl-alanine olefin amino acids connected by an all-carbon i to i+4 crosslinker comprising one double bond
  C-term NH2
  Crosslinked Sequence
XTFAAYWAQLAS

SEQ ID NO: 684 - protein, 12 aa, Artificial Sequence
  Description of Artificial Sequence: Synthetic peptide
  N-term Ac
  MOD_RES (1)..(1): Alpha-Me-Phe
  MOD_RES (4)..(4): Alpha-Me R8-octenyl-alanine olefin amino acids connected by an all-carbon i to i+7 crosslinker comprising one double bond
  MOD_RES (11)..(11): Alpha-Me S5-pentenyl-alanine olefin amino acids connected by an all-carbon i to i+4 crosslinker comprising one double bond
  C-term NH2
  Crosslinked Sequence
FTFAAYWAQLAS

SEQ ID NO: 685 - protein, 12 aa, Artificial Sequence
  Description of Artificial Sequence: Synthetic peptide
  N-term Ac
  MOD_RES (1)..(1): Alpha-Me-Trp
  MOD_RES (4)..(4): Alpha-Me R8-octenyl-alanine olefin amino acids connected by an all-carbon i to i+7 crosslinker comprising one double bond
  MOD_RES (11)..(11): Alpha-Me S5-pentenyl-alanine olefin amino acids connected by an all-carbon i to i+4 crosslinker comprising one double bond
  C-term NH2
  Crosslinked Sequence
WTFAAYWAQLAS

SEQ ID NO: 686 - protein, 12 aa, Artificial Sequence
  Description of Artificial Sequence: Synthetic peptide
  N-term Ac
  MOD_RES (1)..(1): NmLeu
  MOD_RES (4)..(4): Alpha-Me R8-octenyl-alanine olefin amino acids connected by an all-carbon i to i+7 crosslinker comprising one double bond
  MOD_RES (11)..(11): Alpha-Me S5-pentenyl-alanine olefin amino acids connected by an all-carbon i to i+4 crosslinker comprising one double bond
  C-term NH2
  Crosslinked Sequence
LTFAAYWAQLAS

SEQ ID NO: 687 - protein, 12 aa, Artificial Sequence
  Description of Artificial Sequence: Synthetic peptide
  N-term Ac
  MOD_RES (2)..(2): NmThr
  MOD_RES (4)..(4): Alpha-Me R8-octenyl-alanine olefin amino acids connected by an all-carbon i to i+7 crosslinker comprising one double bond
  MOD_RES (11)..(11): Alpha-Me S5-pentenyl-alanine olefin amino acids connected by an all-carbon i to i+4 crosslinker comprising one double bond
  C-term NH2
  Crosslinked Sequence
LTFAAYWAQLAS

SEQ ID NO: 688 - protein, 12 aa, Artificial Sequence
  Description of Artificial Sequence: Synthetic peptide
  N-term Ac
  MOD_RES (2)..(2): Sarcosine
  MOD_RES (4)..(4): Alpha-Me R8-octenyl-alanine olefin amino acids connected by an all-carbon i to i+7 crosslinker comprising one double bond
  MOD_RES (11)..(11): Alpha-Me S5-pentenyl-alanine olefin amino acids connected by an all-carbon i to i+4 crosslinker comprising one double bond
  C-term NH2
  Crosslinked Sequence
LXFAAYWAQLAS

SEQ ID NO: 689 - protein, 12 aa, Artificial Sequence
  Description of Artificial Sequence: Synthetic peptide
  N-term Ac
  MOD_RES (4)..(4): Alpha-Me R8-octenyl-alanine olefin amino acids connected by an all-carbon i to i+7 crosslinker comprising one double bond
  MOD_RES (11)..(11): Alpha-Me S5-pentenyl-alanine olefin amino acids connected by an all-carbon i to i+4 crosslinker comprising one double bond
  C-term NH2
  Crosslinked Sequence
LGFAAYWAQLAS

SEQ ID NO: 690 - protein, 12 aa, Artificial Sequence
  Description of Artificial Sequence: Synthetic peptide
  N-term Ac
  MOD_RES (3)..(3): NmPhe
  MOD_RES (4)..(4): Alpha-Me R8-octenyl-alanine olefin amino acids connected by an all-carbon i to i+7 crosslinker comprising one double bond
  MOD_RES (11)..(11): Alpha-Me S5-pentenyl-alanine olefin amino acids connected by an all-carbon i to i+4 crosslinker comprising one double bond
  C-term NH2
  Crosslinked Sequence
LTFAAYWAQLAS

SEQ ID NO: 691 - protein, 11 aa, Artificial Sequence
  Description of Artificial Sequence: Synthetic peptide
  N-term Ac
  MOD_RES (3)..(3): Alpha-Me R8-octenyl-alanine olefin amino acids connected by an all-carbon i to i+7 crosslinker comprising one double bond
  MOD_RES (10)..(10): Alpha-Me S5-pentenyl-alanine olefin amino acids connected by an all-carbon i to i+4 crosslinker comprising one double bond
  C-term NH2
  Crosslinked Sequence
TFAAYWAQLAS

SEQ ID NO: 692 - protein, 12 aa, Artificial Sequence
  Description of Artificial Sequence: Synthetic peptide
  N-term Ac
  MOD_RES (4)..(4): Alpha-Me R8-octenyl-alanine olefin amino acids connected by an all-carbon i to i+7 crosslinker comprising one double bond
  MOD_RES (11)..(11): Alpha-Me S5-pentenyl-alanine olefin amino acids connected by an all-carbon i to i+4 crosslinker comprising one double bond
  C-term NH2
  Crosslinked Sequence
ETFAAYWAQLAA

SEQ ID NO: 693 - protein, 12 aa, Artificial Sequence
  Description of Artificial Sequence: Synthetic peptide
  MOD_RES (4)..(4): Alpha-Me R8-octenyl-alanine olefin amino acids connected by an all-carbon i to i+7 crosslinker comprising one double bond
  MOD_RES (11)..(11): Alpha-Me S5-pentenyl-alanine olefin amino acids connected by an all-carbon i to i+4 crosslinker comprising one double bond
  C-term NH2
  Crosslinked Sequence
LTFAEYWAQLAA

SEQ ID NO: 694 - protein, 12 aa, Artificial Sequence
  Description of Artificial Sequence: Synthetic peptide
  N-term Ac
  MOD_RES (3)..(3): 2-Naphthylalanine
  MOD_RES (4)..(4): Alpha-Me R8-octenyl-alanine olefin amino acids connected by an all-carbon i to i+7 crosslinker comprising one double bond
  MOD_RES (11)..(11): Alpha-Me S5-pentenyl-alanine olefin amino acids connected by an all-carbon i to i+4 crosslinker comprising one double bond
  C-term NH2
  Crosslinked Sequence
LTAAAYWSQLAS

SEQ ID NO: 695 - protein, 12 aa, Artificial Sequence
  Description of Artificial Sequence: Synthetic peptide
  MOD_RES (4)..(4): Alpha-Me R8-octenyl-alanine olefin amino acids connected by an all-carbon i to i+7 crosslinker comprising one double bond
  MOD_RES (11)..(11): Alpha-Me S5-pentenyl-alanine olefin amino acids connected by an all-carbon i to i+4 crosslinker comprising one double bond
  C-term NH2
  Crosslinked Sequence
LTFAAYWAALAS

SEQ ID NO: 696 - protein, 12 aa, Artificial Sequence
  Description of Artificial Sequence: Synthetic peptide
  N-term Ac
  MOD_RES (4)..(4): Alpha-Me R8-octenyl-alanine olefin amino acids connected by an all-carbon i to i+7 crosslinker comprising one double bond
  MOD_RES (10)..(10): Homo-Cyclohexylalanine
  MOD_RES (11)..(11): Alpha-Me S5-pentenyl-alanine olefin amino acids connected by an all-carbon i to i+4 crosslinker comprising one double bond
  C-term NH2
  Crosslinked Sequence
LTFAAYWAQAAS

SEQ ID NO: 697 - protein, 12 aa, Artificial Sequence
  Description of Artificial Sequence: Synthetic peptide
  MOD_RES (4)..(4): Alpha-Me R8-octenyl-alanine olefin amino acids connected by an all-carbon i to i+7 crosslinker comprising one double bond
  MOD_RES (10)..(10): Cyclohexylglycine
  MOD_RES (11)..(11): Alpha-Me S5-pentenyl-alanine olefin amino acids connected by an all-carbon i to i+4 crosslinker comprising one double bond
  C-term NH2
  Crosslinked Sequence
LTFAAYWAQGAS

SEQ ID NO: 698 - protein, 12 aa, Artificial Sequence
  Description of Artificial Sequence: Synthetic peptide
  N-term Ac
  MOD_RES (4)..(4): Alpha-Me R8-octenyl-alanine olefin amino acids connected by an all-carbon i to i+7 crosslinker comprising one double bond
  MOD_RES (10)..(10): Cyclobutyl-Ala
  MOD_RES (11)..(11): Alpha-Me S5-pentenyl-alanine olefin amino acids connected by an all-carbon i to i+4 crosslinker comprising one double bond
  C-term NH2
  Crosslinked Sequence
LTFAAYWAQAAS

SEQ ID NO: 699 - protein, 12 aa, Artificial Sequence
  Description of Artificial Sequence: Synthetic peptide
  N-term Ac
  MOD_RES (4)..(4): Alpha-Me R8-octenyl-alanine olefin amino acids connected by an all-carbon i to i+7 crosslinker comprising one double bond
  MOD_RES (10)..(10): Phe-3CF3
  MOD_RES (11)..(11): Alpha-Me S5-pentenyl-alanine olefin amino acids connected by an all-carbon i to i+4 crosslinker comprising one double bond
  C-term NH2
  Crosslinked Sequence
LTFAAYWAQFAS

SEQ ID NO: 700 - protein, 12 aa, Artificial Sequence
  Description of Artificial Sequence: Synthetic peptide
  N-term Ac
  MOD_RES (4)..(4): Alpha-Me R8-octenyl-alanine olefin amino acids connected by an all-carbon i to i+7 crosslinker comprising one double bond
  MOD_RES (10)..(10): 1-Naphthylalanine
  MOD_RES (11)..(11): Alpha-Me S5-pentenyl-alanine olefin amino acids connected by an all-carbon i to i+4 crosslinker comprising one double bond
  C-term NH2
  Crosslinked Sequence
LTFAAYWAQAAS

SEQ ID NO: 701 - protein, 12 aa, Artificial Sequence
  Description of Artificial Sequence: Synthetic peptide
  N-term Ac
  MOD_RES (4)..(4): Alpha-Me R8-octenyl-alanine olefin amino acids connected by an all-carbon i to i+7 crosslinker comprising one double bond
  MOD_RES (10)..(10): Biphenylalanine
  MOD_RES (11)..(11): Alpha-Me S5-pentenyl-alanine olefin amino acids connected by an all-carbon i to i+4 crosslinker comprising one double bond
  C-term NH2
  Crosslinked Sequence
LTFAAYWAQFAS

SEQ ID NO: 702 - protein, 12 aa, Artificial Sequence
  Description of Artificial Sequence: Synthetic peptide
  N-term Ac
  MOD_RES (3)..(3): 2-Naphthylalanine
  MOD_RES (4)..(4): Alpha-Me R8-octenyl-alanine olefin amino acids connected by an all-carbon i to i+7 crosslinker comprising one double bond
  MOD_RES (11)..(11): Alpha-Me S5-pentenyl-alanine olefin amino acids connected by an all-carbon i to i+4 crosslinker comprising one double bond
  C-term NH2
  Crosslinked Sequence
LTAAAYWAQLAS

SEQ ID NO: 703 - protein, 12 aa, Artificial Sequence
  Description of Artificial Sequence: Synthetic peptide
  N-term Ac
  MOD_RES (4)..(4): Alpha-Me R8-octenyl-alanine olefin amino acids connected by an all-carbon i to i+7 crosslinker comprising one double bond
  MOD_RES (11)..(11): Alpha-Me S5-pentenyl-alanine olefin amino acids connected by an all-carbon i to i+4 crosslinker comprising one double bond
  C-term NH2
  Crosslinked Sequence
LTFAAYWVQLAS

SEQ ID NO: 704 - protein, 12 aa, Artificial Sequence
  Description of Artificial Sequence: Synthetic peptide
  N-term Ac
  MOD_RES (4)..(4): Alpha-Me R8-octenyl-alanine olefin amino acids connected by an all-carbon i to i+7 crosslinker comprising one double bond
  MOD_RES (11)..(11): Alpha-Me S5-pentenyl-alanine olefin amino acids connected by an all-carbon i to i+4 crosslinker comprising one double bond
  C-term NH2
  Crosslinked Sequence
LTFAAWWAQLAS

SEQ ID NO: 705 - protein, 12 aa, Artificial Sequence
  Description of Artificial Sequence: Synthetic peptide
  N-term Ac
  MOD_RES (4)..(4): Alpha-Me R8-octenyl-alanine olefin amino acids connected by an all-carbon i to i+7 crosslinker comprising one double bond
  MOD_RES (11)..(11): Alpha-Me S5-pentenyl-alanine olefin amino acids connected by an all-carbon i to i+4 crosslinker comprising one double bond
  C-term NH2
  Crosslinked Sequence
FTFAVYWSQLAS

SEQ ID NO: 706 - protein, 12 aa, Artificial Sequence
  Description of Artificial Sequence: Synthetic peptide
  N-term Ac
  MOD_RES (4)..(4): Alpha-Me R8-octenyl-alanine olefin amino acids connected by an all-carbon i to i+7 crosslinker comprising one double bond
  MOD_RES (11)..(11): Alpha-Me S5-pentenyl-alanine olefin amino acids connected by an all-carbon i to i+4 crosslinker comprising one double bond
  C-term NH2
  Crosslinked Sequence
ITFAFYWAQLAS

SEQ ID NO: 707 - protein, 12 aa, Artificial Sequence
  Description of Artificial Sequence: Synthetic peptide
  N-term Ac
  MOD_RES (4)..(4): Alpha-Me R8-octenyl-alanine olefin amino acids connected by an all-carbon i to i+7 crosslinker comprising one double bond
  MOD_RES (11)..(11): Alpha-Me S5-pentenyl-alanine olefin amino acids connected by an all-carbon i to i+4 crosslinker comprising one double bond
  C-term NH2
  Crosslinked Sequence
ITFALYWSQLAS

SEQ ID NO: 708 - protein, 12 aa, Artificial Sequence
  Description of Artificial Sequence: Synthetic peptide
  N-term Ac
  MOD_RES (4)..(4): Alpha-Me R8-octenyl-alanine olefin amino acids connected by an all-carbon i to i+7 crosslinker comprising one double bond
  MOD_RES (11)..(11): Alpha-Me S5-pentenyl-alanine olefin amino acids connected by an all-carbon i to i+4 crosslinker comprising one double bond
  C-term NH2
  Crosslinked Sequence
FTFAFYWAQLAS

SEQ ID NO: 709 - protein, 12 aa, Artificial Sequence
  Description of Artificial Sequence: Synthetic peptide
  N-term Ac
  MOD_RES (4)..(4): Alpha-Me R8-octenyl-alanine olefin amino acids connected by an all-carbon i to i+7 crosslinker comprising one double bond
  MOD_RES (11)..(11): Alpha-Me S5-pentenyl-alanine olefin amino acids connected by an all-carbon i to i+4 crosslinker comprising one double bond
  C-term NH2
  Crosslinked Sequence
VTFAAYWSQLAS

SEQ ID NO: 710 - protein, 12 aa, Artificial Sequence
  Description of Artificial Sequence: Synthetic peptide
  N-term Ac
  MOD_RES (4)..(4): Alpha-Me R8-octenyl-alanine olefin amino acids connected by an all-carbon i to i+7 crosslinker comprising one double bond
  MOD_RES (11)..(11): Alpha-Me S5-pentenyl-alanine olefin amino acids connected by an all-carbon i to i+4 crosslinker comprising one double bond
  C-term NH2
  Crosslinked Sequence
LTFAAHWAQLAS

SEQ ID NO: 711 - protein, 12 aa, Artificial Sequence
  Description of Artificial Sequence: Synthetic peptide
  N-term Ac
  MOD_RES (4)..(4): Alpha-Me R8-octenyl-alanine olefin amino acids connected by an all-carbon i to i+7 crosslinker comprising one double bond
  MOD_RES (11)..(11): Alpha-Me S5-pentenyl-alanine olefin amino acids connected by an all-carbon i to i+4 crosslinker comprising one double bond
  C-term NH2
  Crosslinked Sequence
LTFAAYWAQLAH

SEQ ID NO: 712 - protein, 12 aa, Artificial Sequence
  Description of Artificial Sequence: Synthetic peptide
  N-term Ac
  MOD_RES (4)..(4): Alpha-Me R8-octenyl-alanine olefin amino acids connected by an all-carbon i to i+7 crosslinker comprising one double bond
  MOD_RES (11)..(11): Alpha-Me S5-pentenyl-alanine olefin amino acids connected by an all-carbon i to i+4 crosslinker comprising one double bond
  C-term NH2
  Crosslinked Sequence
LTFAAYWAHLAS

SEQ ID NO: 713 - protein, 14 aa, Artificial Sequence
  Description of Artificial Sequence: Synthetic peptide
  N-term Ac
  MOD_RES (1)..(1): D-Ala
  MOD_RES (2)..(2): 2-aminoisobutyric acid
  MOD_RES (6)..(6): Alpha-Me R8-octenyl-alanine olefin amino acids connected by an all-carbon i to i+7 crosslinker comprising one double bond
  MOD_RES (13)..(13): Alpha-Me S5-pentenyl-alanine olefin amino acids connected by an all-carbon i to i+4 crosslinker comprising one double bond
  C-term NH2
  Crosslinked Sequence
AXWTFAVYWSQLAS

SEQ ID NO: 714 - protein, 13 aa, Artificial Sequence
  Description of Artificial Sequence: Synthetic peptide
  N-term Ac
  MOD_RES (1)..(1): 2-aminoisobutyric acid
  MOD_RES (5)..(5): Alpha-Me R8-octenyl-alanine olefin amino acids connected by an all-carbon i to i+7 crosslinker comprising one double bond
  MOD_RES (12)..(12): Alpha-Me S5-pentenyl-alanine olefin amino acids connected by an all-carbon i to i+4 crosslinker comprising one double bond
  C-term NH2
  Crosslinked Sequence
XWTFAHYWAQLAS

SEQ ID NO: 715 - protein, 14 aa, Artificial Sequence
  Description of Artificial Sequence: Synthetic peptide
  N-term Ac
  MOD_RES (1)..(1): 2-aminoisobutyric acid
  MOD_RES (6)..(6): Alpha-Me R8-octenyl-alanine olefin amino acids connected by an all-carbon i to i+7 crosslinker comprising one double bond
  MOD_RES (13)..(13): Alpha-Me S5-pentenyl-alanine olefin amino acids connected by an all-carbon i to i+4 crosslinker comprising one double bond
  C-term NH2
  Crosslinked Sequence
XAWTFAHYWAQLAS

SEQ ID NO: 716 - protein, 13 aa, Artificial Sequence
  Description of Artificial Sequence: Synthetic peptide
  N-term Ac
  MOD_RES (1)..(1): D-Phe
  MOD_RES (5)..(5): Alpha-Me R8-octenyl-alanine olefin amino acids connected by an all-carbon i to i+7 crosslinker comprising one double bond
  MOD_RES (12)..(12): Alpha-Me S5-pentenyl-alanine olefin amino acids connected by an all-carbon i to i+4 crosslinker comprising one double bond
  C-term NH2
  Crosslinked Sequence
FWTFAHYWAQLAS

SEQ ID NO: 717 - protein, 14 aa, Artificial Sequence
  Description of Artificial Sequence: Synthetic peptide
  N-term Ac
  MOD_RES (1)..(1): 2-aminoisobutyric acid
  MOD_RES (6)..(6): Alpha-Me R8-octenyl-alanine olefin amino acids connected by an all-carbon i to i+7 crosslinker comprising one double bond
  MOD_RES (13)..(13): Alpha-Me S5-pentenyl-alanine olefin amino acids connected by an all-carbon i to i+4 crosslinker comprising one double bond
  C-term NH2
  Crosslinked Sequence
XWWTFAHYWAQLAS

SEQ ID NO: 718 - protein, 12 aa, Artificial Sequence
  Description of Artificial Sequence: Synthetic peptide
  N-term Ac
  MOD_RES (4)..(4): Alpha-Me R8-octenyl-alanine olefin amino acids connected by an all-carbon i to i+7 crosslinker comprising one double bond
  MOD_RES (11)..(11): Alpha-Me S5-pentenyl-alanine olefin amino acids connected by an all-carbon i to i+4 crosslinker comprising one double bond
  C-term NH2
  Crosslinked Sequence
WTFALYWSQLAS

SEQ ID NO: 719 - protein, 12 aa, Artificial Sequence
  Description of Artificial Sequence: Synthetic peptide
  N-term Ac
  MOD_RES (4)..(4): Alpha-Me R8-octenyl-alanine olefin amino acids connected by an all-carbon i to i+7 crosslinker comprising one double bond
  MOD_RES (5)..(5): Norleucine
  MOD_RES (11)..(11): Alpha-Me S5-pentenyl-alanine olefin amino acids connected by an all-carbon i to i+4 crosslinker comprising one double bond
  C-term NH2
  Crosslinked Sequence
WTFALYWSQLAS

SEQ ID NO: 720 - protein, 12 aa, Artificial Sequence
  Description of Artificial Sequence: Synthetic peptide
  N-term Ac
  MOD_RES (4)..(4): Alpha-Me R8-octenyl-alanine olefin amino acids connected by an all-carbon i to i+7 crosslinker comprising one double bond
  MOD_RES (11)..(11): Alpha-Me S5-pentenyl-alanine olefin amino acids connected by an all-carbon i to i+4 crosslinker comprising one double bond
  MOD_RES (12)..(12): D-Ala
  C-term NH2
  Crosslinked Sequence
LTFAAYWSQLAA

SEQ ID NO: 721 - protein, 12 aa, Artificial Sequence
  Description of Artificial Sequence: Synthetic peptide
  N-term Ac
  MOD_RES (4)..(4): Alpha-Me R8-octenyl-alanine olefin amino acids connected by an all-carbon i to i+7 crosslinker comprising one double bond
  MOD_RES (11)..(11): Alpha-Me S5-pentenyl-alanine olefin amino acids connected by an all-carbon i to i+4 crosslinker comprising one double bond
  C-term NH2
  Crosslinked Sequence
LTFAEYWARLAA

SEQ ID NO: 722 - protein, 12 aa, Artificial Sequence
  Description of Artificial Sequence: Synthetic peptide
  N-term Ac
  MOD_RES (4)..(4): Alpha-Me R8-octenyl-alanine olefin amino acids connected by an all-carbon i to i+7 crosslinker comprising one double bond
  MOD_RES (11)..(11): Alpha-Me S5-pentenyl-alanine olefin amino acids connected by an all-carbon i to i+4 crosslinker comprising one double bond
  C-term NH2
  Crosslinked Sequence
LTFAEYWAHLAA

SEQ ID NO: 723 - protein, 12 aa, Artificial Sequence
  Description of Artificial Sequence: Synthetic peptide
  N-term Ac
  MOD_RES (1)..(1): D-Ala
  MOD_RES (4)..(4): Alpha-Me R8-octenyl-alanine olefin amino acids connected by an all-carbon i to i+7 crosslinker comprising one double bond
  MOD_RES (11)..(11): Alpha-Me S5-pentenyl-alanine olefin amino acids connected by an all-carbon i to i+4 crosslinker comprising one double bond
  C-term NH2
  Crosslinked Sequence
ATFAAYWAQLAS

SEQ ID NO: 724 - protein, 12 aa, Artificial Sequence
  Description of Artificial Sequence: Synthetic peptide
  N-term Ac
  MOD_RES (1)..(1): 2-aminoisobutyric acid
  MOD_RES (4)..(4): Alpha-Me R8-octenyl-alanine olefin amino acids connected by an all-carbon i to i+7 crosslinker comprising one double bond
  MOD_RES (11)..(11): Alpha-Me S5-pentenyl-alanine olefin amino acids connected by an all-carbon i to i+4 crosslinker comprising one double bond
  C-term NH2
  Crosslinked Sequence
XTFAAYWAQLAS

SEQ ID NO: 725 - protein, 12 aa, Artificial Sequence
  Description of Artificial Sequence: Synthetic peptide
  N-term Ac
  MOD_RES (1)..(1): Alpha-Me-Phe
  MOD_RES (4)..(4): Alpha-Me R8-octenyl-alanine olefin amino acids connected by an all-carbon i to i+7 crosslinker comprising one double bond
  MOD_RES (11)..(11): Alpha-Me S5-pentenyl-alanine olefin amino acids connected by an all-carbon i to i+4 crosslinker comprising one double bond
  C-term NH2
  Crosslinked Sequence
FTFAAYWAQLAS

SEQ ID NO: 726 - protein, 12 aa, Artificial Sequence
  Description of Artificial Sequence: Synthetic peptide
  N-term Ac
  MOD_RES (1)..(1): Alpha-Me-Trp
  MOD_RES (4)..(4): Alpha-Me R8-octenyl-alanine olefin amino acids connected by an all-carbon i to i+7 crosslinker comprising one double bond
  MOD_RES (11)..(11): Alpha-Me S5-pentenyl-alanine olefin amino acids connected by an all-carbon i to i+4 crosslinker comprising one double bond
  C-term NH2
  Crosslinked Sequence
WTFAAYWAQLAS

SEQ ID NO: 727 - protein, 12 aa, Artificial Sequence
  Description of Artificial Sequence: Synthetic peptide
  N-term Ac
  MOD_RES (1)..(1): NmLeu
  MOD_RES (4)..(4): Alpha-Me R8-octenyl-alanine olefin amino acids connected by an all-carbon i to i+7 crosslinker comprising one double bond
  MOD_RES (11)..(11): Alpha-Me S5-pentenyl-alanine olefin amino acids connected by an all-carbon i to i+4 crosslinker comprising one double bond
  C-term NH2
  Crosslinked Sequence
LTFAAYWAQLAS

SEQ ID NO: 728 - protein, 12 aa, Artificial Sequence
  Description of Artificial Sequence: Synthetic peptide
  N-term Ac
  MOD_RES (2)..(2): NmThr
  MOD_RES (4)..(4): Alpha-Me R8-octenyl-alanine olefin amino acids connected by an all-carbon i to i+7 crosslinker comprising one double bond
  MOD_RES (11)..(11): Alpha-Me S5-pentenyl-alanine olefin amino acids connected by an all-carbon i to i+4 crosslinker comprising one double bond
  C-term NH2
  Crosslinked Sequence
LTFAAYWAQLAS

SEQ ID NO: 729 - protein, 12 aa, Artificial Sequence
  Description of Artificial Sequence: Synthetic peptide
  N-term Ac
  MOD_RES (2)..(2): Sarcosine
  MOD_RES (4)..(4): Alpha-Me R8-octenyl-alanine olefin amino acids connected by an all-carbon i to i+7 crosslinker comprising one double bond
  MOD_RES (11)..(11): Alpha-Me S5-pentenyl-alanine olefin amino acids connected by an all-carbon i to i+4 crosslinker comprising one double bond
  C-term NH2
  Crosslinked Sequence
LXFAAYWAQLAS

SEQ ID NO: 730 - protein, 11 aa, Artificial Sequence
  Description of Artificial Sequence: Synthetic peptide
  N-term Ac
  MOD_RES (3)..(3): Alpha-Me R8-octenyl-alanine olefin amino acids connected by an all-carbon i to i+7 crosslinker comprising one double bond
  MOD_RES (10)..(10): Alpha-Me S5-pentenyl-alanine olefin amino acids connected by an all-carbon i to i+4 crosslinker comprising one double bond
  C-term NH2
  Crosslinked Sequence
TFAAYWAQLAS

SEQ ID NO: 731 - protein, 12 aa, Artificial Sequence
  Description of Artificial Sequence: Synthetic peptide
  N-term Ac
  MOD_RES (4)..(4): Alpha-Me R8-octenyl-alanine olefin amino acids connected by an all-carbon i to i+7 crosslinker comprising one double bond
  MOD_RES (11)..(11): Alpha-Me S5-pentenyl-alanine olefin amino acids connected by an all-carbon i to i+4 crosslinker comprising one double bond
  C-term NH2
  Crosslinked Sequence
ETFAAYWAQLAA

SEQ ID NO: 732 - protein, 12 aa, Artificial Sequence
  Description of Artificial Sequence: Synthetic peptide
  N-term Ac
  MOD_RES (4)..(4): Alpha-Me R8-octenyl-alanine olefin amino acids connected by an all-carbon i to i+7 crosslinker comprising one double bond
  MOD_RES (11)..(11): Alpha-Me S5-pentenyl-alanine olefin amino acids connected by an all-carbon i to i+4 crosslinker comprising one double bond
  C-term NH2
  Crosslinked Sequence
LTFAEYWAQLAA

SEQ ID NO: 733 - protein, 12 aa, Artificial Sequence
  Description of Artificial Sequence: Synthetic peptide
  N-term Ac
  MOD_RES (4)..(4): Alpha-Me R8-octenyl-alanine olefin amino acids connected by an all-carbon i to i+7 crosslinker comprising one double bond
  MOD_RES (11)..(11): Alpha-Me S5-pentenyl-alanine olefin amino acids connected by an all-carbon i to i+4 crosslinker comprising one double bond
  C-term NH2
  Crosslinked Sequence
WTFAVYWSQLAS

SEQ ID NO: 734 - protein, 12 aa, Artificial Sequence
  Description of Artificial Sequence: Synthetic peptide
  N-term Ac
  MOD_RES (4)..(4): Alpha-Me R8-octenyl-alanine olefin amino acids connected by an all-carbon i to i+7 crosslinker comprising one double bond
  MOD_RES (11)..(11): Alpha-Me S5-pentenyl-alanine olefin amino acids connected by an all-carbon i to i+4 crosslinker comprising one double bond
  C-term NH2
  Crosslinked Sequence
YTFAFYWSQLAS

SEQ ID NO: 735 - protein, 10 aa, Artificial Sequence
  Description of Artificial Sequence: Synthetic peptide
  N-term Ac
  MOD_RES (2)..(2): Alpha-Me R8-octenyl-alanine olefin amino acids connected by an all-carbon i to i+7 crosslinker comprising one double bond
  MOD_RES (5)..(5): 6cl-Trp
  MOD_RES (9)..(9): Alpha-Me S5-pentenyl-alanine olefin amino acids connected by an all-carbon i to i+4 crosslinker comprising one double bond
  C-term NH2
  Crosslinked Sequence
FAAYWSALAA

SEQ ID NO: 736 - protein, 12 aa, Artificial Sequence
  Description of Artificial Sequence: Synthetic peptide
  N-term Ac
  MOD_RES (4)..(4): Alpha-Me R8-octenyl-alanine olefin amino acids connected by an all-carbon i to i+7 crosslinker comprising one double bond
  MOD_RES (11)..(11): Alpha-Me S5-pentenyl-alanine olefin amino acids connected by an all-carbon i to i+4 crosslinker comprising one double bond
  C-term NH2
  Crosslinked Sequence
ETFAEYWVQLAS

SEQ ID NO: 737 - protein, 12 aa, Artificial Sequence
  Description of Artificial Sequence: Synthetic peptide
  N-term Ac
  MOD_RES (4)..(4): Alpha-Me R8-octenyl-alanine olefin amino acids connected by an all-carbon i to i+7 crosslinker comprising one double bond
  MOD_RES (11)..(11): Alpha-Me S5-pentenyl-alanine olefin amino acids connected by an all-carbon i to i+4 crosslinker comprising one double bond
  C-term NH2
  Crosslinked Sequence
ETFAEHWAQLAA

SEQ ID NO: 738 - protein, 12 aa, Artificial Sequence
  Description of Artificial Sequence: Synthetic peptide
  N-term Ac
  MOD_RES (4)..(4): Alpha-Me R8-octenyl-alanine olefin amino acids connected by an all-carbon i to i+7 crosslinker comprising one double bond
  MOD_RES (11)..(11): Alpha-Me S5-pentenyl-alanine olefin amino acids connected by an all-carbon i to i+4 crosslinker comprising one double bond
  C-term NH2
  Crosslinked Sequence
ITFAEYWAQLAS

SEQ ID NO: 739 - protein, 12 aa, Artificial Sequence
  Description of Artificial Sequence: Synthetic peptide
  N-term Ac
  MOD_RES (4)..(4): Alpha-Me R8-octenyl-alanine olefin amino acids connected by an all-carbon i to i+7 crosslinker comprising one double bond
  MOD_RES (11)..(11): Alpha-Me S5-pentenyl-alanine olefin amino acids connected by an all-carbon i to i+4 crosslinker comprising one double bond
  C-term NH2
  Crosslinked Sequence
ITFAEHWVQLAA

SEQ ID NO: 740 - protein, 12 aa, Artificial Sequence
  Description of Artificial Sequence: Synthetic peptide
  N-term Ac
  MOD_RES (4)..(4): Alpha-Me R8-octenyl-alanine olefin amino acids connected by an all-carbon i to i+7 crosslinker comprising one double bond
  MOD_RES (11)..(11): Alpha-Me S5-pentenyl-alanine olefin amino acids connected by an all-carbon i to i+4 crosslinker comprising one double bond
  C-term NH2
  Crosslinked Sequence
ITFAEHWAQLAS

SEQ ID NO: 741 - protein, 12 aa, Artificial Sequence
  Description of Artificial Sequence: Synthetic peptide
  N-term Ac
  MOD_RES (3)..(3): Phe-4F
  MOD_RES (4)..(4): Alpha-Me R8-octenyl-alanine olefin amino acids connected by an all-carbon i to i+7 crosslinker comprising one double bond
  MOD_RES (10)..(10): Cyclobutyl-Ala
  MOD_RES (11)..(11): Alpha-Me S5-pentenyl-alanine olefin amino acids connected by an all-carbon i to i+4 crosslinker comprising one double bond
  C-term NH2
  Crosslinked Sequence
LTFAAYWAQAAS

SEQ ID NO: 742 - protein, 12 aa, Artificial Sequence
  Description of Artificial Sequence: Synthetic peptide
  N-term Ac
  MOD_RES (3)..(3): Phe-3Cl
  MOD_RES (4)..(4): Alpha-Me R8-octenyl-alanine olefin amino acids connected by an all-carbon i to i+7 crosslinker comprising one double bond
  MOD_RES (10)..(10): Homo-Leu
  MOD_RES (11)..(11): Alpha-Me S5-pentenyl-alanine olefin amino acids connected by an all-carbon i to i+4 crosslinker comprising one double bond
  C-term NH2
  Crosslinked Sequence
LTFAAYWAQLAS

SEQ ID NO: 743 - protein, 12 aa, Artificial Sequence
  Description of Artificial Sequence: Synthetic peptide
  N-term Ac
  MOD_RES (3)..(3): Phe-3Cl
  MOD_RES (4)..(4): Alpha-Me R8-octenyl-alanine olefin amino acids connected by an all-carbon i to i+7 crosslinker comprising one double bond
  MOD_RES (10)..(10): Cyclohexylalanine
  MOD_RES (11)..(11): Alpha-Me S5-pentenyl-alanine olefin amino acids connected by an all-carbon i to i+4 crosslinker comprising one double bond
  C-term NH2
  Crosslinked Sequence
LTFAAYWAQAAS

SEQ ID NO: 744 - protein, 12 aa, Artificial Sequence
  Description of Artificial Sequence: Synthetic peptide
  N-term Ac
  MOD_RES (3)..(3): Phe-3Cl
  MOD_RES (4)..(4): Alpha-Me R8-octenyl-alanine olefin amino acids connected by an all-carbon i to i+7 crosslinker comprising one double bond
  MOD_RES (10)..(10): Cyclohexylglycine
  MOD_RES (11)..(11): Alpha-Me S5-pentenyl-alanine olefin amino acids connected by an all-carbon i to i+4 crosslinker comprising one double bond
  C-term NH2
  Crosslinked Sequence
LTFAAYWAQGAS

SEQ ID NO: 745 - protein, 12 aa, Artificial Sequence
  Description of Artificial Sequence: Synthetic peptide
  N-term Ac
  MOD_RES (3)..(3): Phe-3Cl
  MOD_RES (4)..(4): Alpha-Me R8-octenyl-alanine olefin amino acids connected by an all-carbon i to i+7 crosslinker comprising one double bond
  MOD_RES (10)..(10): Cyclobutyl-Ala
  MOD_RES (11)..(11): Alpha-Me S5-pentenyl-alanine olefin amino acids connected by an all-carbon i to i+4 crosslinker comprising one double bond
  C-term NH2
  Crosslinked Sequence
LTFAAYWAQAAS

SEQ ID NO: 746 - protein, 12 aa, Artificial Sequence
  Description of Artificial Sequence: Synthetic peptide
  N-term Ac
  MOD_RES (4)..(4): Alpha-Me R8-octenyl-alanine olefin amino acids connected by an all-carbon i to i+7 crosslinker comprising one double bond
  MOD_RES (7)..(7): 6cl-Trp
  MOD_RES (11)..(11): Alpha-Me S5-pentenyl-alanine olefin amino acids connected by an all-carbon i to i+4 crosslinker comprising one double bond
  C-term NH2
  Crosslinked Sequence
LTFAAYWSQLAS

SEQ ID NO: 747 - protein, 12 aa, Artificial Sequence
  Description of Artificial Sequence: Synthetic peptide
  N-term Ac
  MOD_RES (3)..(3): Phe-4F
  MOD_RES (4)..(4): Alpha-Me R8-octenyl-alanine olefin amino acids connected by an all-carbon i to i+7 crosslinker comprising one double bond
  MOD_RES (10)..(10): Homo-Leu
  MOD_RES (11)..(11): Alpha-Me S5-pentenyl-alanine olefin amino acids connected by an all-carbon i to i+4 crosslinker comprising one double bond
  C-term NH2
  Crosslinked Sequence
LTFAHYWAQLAS

SEQ ID NO: 748 - protein, 12 aa, Artificial Sequence
  Description of Artificial Sequence: Synthetic peptide
  N-term Ac
  MOD_RES (3)..(3): Phe-4F
  MOD_RES (4)..(4): Alpha-Me R8-octenyl-alanine olefin amino acids connected by an all-carbon i to i+7 crosslinker comprising one double bond
  MOD_RES (10)..(10): Cyclobutyl-Ala
  MOD_RES (11)..(11): Alpha-Me S5-pentenyl-alanine olefin amino acids connected by an all-carbon i to i+4 crosslinker comprising one double bond
  C-term NH2
  Crosslinked Sequence
LTFAHYWAQAAS

SEQ ID NO: 749 - protein, 12 aa, Artificial Sequence
  Description of Artificial Sequence: Synthetic peptide
  N-term Ac
  MOD_RES (3)..(3): Phe-4F
  MOD_RES (4)..(4): Alpha-Me R8-octenyl-alanine olefin amino acids connected by an all-carbon i to i+7 crosslinker comprising one double bond
  MOD_RES (10)..(10): Homo-Leu
  MOD_RES (11)..(11): Alpha-Me S5-pentenyl-alanine olefin amino acids connected by an all-carbon i to i+4 crosslinker comprising one double bond
  C-term NH2
  Crosslinked Sequence
LTFAHYWAQLAS

SEQ ID NO: 750 - protein, 12 aa, Artificial Sequence
  Description of Artificial Sequence: Synthetic peptide
  N-term Ac
  MOD_RES (3)..(3): Phe-4F
  MOD_RES (4)..(4): Alpha-Me R8-octenyl-alanine olefin amino acids connected by an all-carbon i to i+7 crosslinker comprising one double bond
  MOD_RES (10)..(10): Cyclohexylglycine
  MOD_RES (11)..(11): Alpha-Me S5-pentenyl-alanine olefin amino acids connected by an all-carbon i to i+4 crosslinker comprising one double bond
  C-term NH2
  Crosslinked Sequence
LTFAHYWAQGAS

SEQ ID NO: 751 - protein, 12 aa, Artificial Sequence
  Description of Artificial Sequence: Synthetic peptide
  N-term Ac
  MOD_RES (4)..(4): Alpha-Me R8-octenyl-alanine olefin amino acids connected by an all-carbon i to i+7 crosslinker comprising one double bond
  MOD_RES (11)..(11): Alpha-Me S5-pentenyl-alanine olefin amino acids connected by an all-carbon i to i+4 crosslinker comprising one double bond
  C-term NH2
  Crosslinked Sequence
ETFAEYWVALAS

SEQ ID NO: 752 - protein, 12 aa, Artificial Sequence
  Description of Artificial Sequence: Synthetic peptide
  N-term Ac
  MOD_RES (4)..(4): Alpha-Me R8-octenyl-alanine olefin amino acids connected by an all-carbon i to i+7 crosslinker comprising one double bond
  MOD_RES (11)..(11): Alpha-Me S5-pentenyl-alanine olefin amino acids connected by an all-carbon i to i+4 crosslinker comprising one double bond
  C-term NH2
  Crosslinked Sequence
ETFAEHWAALAA

SEQ ID NO: 753 - protein, 12 aa, Artificial Sequence
  Description of Artificial Sequence: Synthetic peptide
  N-term Ac
  MOD_RES (4)..(4): Alpha-Me R8-octenyl-alanine olefin amino acids connected by an all-carbon i to i+7 crosslinker comprising one double bond
  MOD_RES (11)..(11): Alpha-Me S5-pentenyl-alanine olefin amino acids connected by an all-carbon i to i+4 crosslinker comprising one double bond
  C-term NH2
  Crosslinked Sequence
ITFAEYWAALAS

SEQ ID NO: 754 - protein, 12 aa, Artificial Sequence
  Description of Artificial Sequence: Synthetic peptide
  N-term Ac
  MOD_RES (4)..(4): Alpha-Me R8-octenyl-alanine olefin amino acids connected by an all-carbon i to i+7 crosslinker comprising one double bond
  MOD_RES (11)..(11): Alpha-Me S5-pentenyl-alanine olefin amino acids connected by an all-carbon i to i+4 crosslinker comprising one double bond
  C-term NH2
  Crosslinked Sequence
ITFAEHWVALAA

SEQ ID NO: 755 - protein, 12 aa, Artificial Sequence
  Description of Artificial Sequence: Synthetic peptide
  N-term Ac
  MOD_RES (4)..(4): Alpha-Me R8-octenyl-alanine olefin amino acids connected by an all-carbon i to i+7 crosslinker comprising one double bond
  MOD_RES (11)..(11): Alpha-Me S5-pentenyl-alanine olefin amino acids connected by an all-carbon i to i+4 crosslinker comprising one double bond
  C-term NH2
  Crosslinked Sequence
ITFAEHWAALAS

SEQ ID NO: 756 - protein, 12 aa, Artificial Sequence
  Description of Artificial Sequence: Synthetic peptide
  N-term Pam
  MOD_RES (4)..(4): Alpha-Me R8-octenyl-alanine olefin amino acids connected by an all-carbon i to i+7 crosslinker comprising one double bond
  MOD_RES (11)..(11): Alpha-Me S5-pentenyl-alanine olefin amino acids connected by an all-carbon i to i+4 crosslinker comprising one double bond
  C-term NH2
  Crosslinked Sequence
LTFAEYWAQLAS

SEQ ID NO: 757 - protein, 12 aa, Artificial Sequence
  Description of Artificial Sequence: Synthetic peptide
  N-term Pam
  MOD_RES (4)..(4): Alpha-Me R8-octenyl-alanine olefin amino acids connected by an all-carbon i to i+7 crosslinker comprising one double bond
  MOD_RES (11)..(11): Alpha-Me S5-pentenyl-alanine olefin amino acids connected by an all-carbon i to i+4 crosslinker comprising one double bond
  C-term NH2
  Crosslinked Sequence
ETFAEYWAQLAS

SEQ ID NO: 758 - protein, 12 aa, Artificial Sequence
  Description of Artificial Sequence: Synthetic peptide
  N-term Ac
  MOD_RES (4)..(4): Alpha-Me R8-octenyl-alanine olefin amino acids connected by an all-carbon i to i+7 crosslinker comprising one double bond
  MOD_RES (11)..(11): Alpha-Me S5-pentenyl-alanine olefin amino acids connected by an all-carbon i to i+4 crosslinker comprising one double bond
  C-term NH2
  Crosslinked Sequence
LTFAAYWLQLAS

SEQ ID NO: 759 - protein, 12 aa, Artificial Sequence
  Description of Artificial Sequence: Synthetic peptide
  N-term Ac
  MOD_RES (4)..(4): Alpha-Me R8-octenyl-alanine olefin amino acids connected by an all-carbon i to i+7 crosslinker comprising one double bond
  MOD_RES (11)..(11): Alpha-Me S5-pentenyl-alanine olefin amino acids connected by an all-carbon i to i+4 crosslinker comprising one double bond
  C-term NH2
  Crosslinked Sequence
LTFAEYWLQLAS

SEQ ID NO: 760 - protein, 12 aa, Artificial Sequence
  Description of Artificial Sequence: Synthetic peptide
  N-term Ac
  MOD_RES (4)..(4): Alpha-Me R8-octenyl-alanine olefin amino acids connected by an all-carbon i to i+7 crosslinker comprising one double bond
  MOD_RES (11)..(11): Alpha-Me S5-pentenyl-alanine olefin amino acids connected by an all-carbon i to i+4 crosslinker comprising one double bond
  C-term NH2
  Crosslinked Sequence
LTFAEHWLQLAS

SEQ ID NO: 761 - protein, 12 aa, Artificial Sequence
  Description of Artificial Sequence: Synthetic peptide
  N-term Ac
  MOD_RES (4)..(4): Alpha-Me R8-octenyl-alanine olefin amino acids connected by an all-carbon i to i+7 crosslinker comprising one double bond
  MOD_RES (11)..(11): Alpha-Me S5-pentenyl-alanine olefin amino acids connected by an all-carbon i to i+4 crosslinker comprising one double bond
  C-term NH2
  Crosslinked Sequence
LTFAVYWAQLAS

SEQ ID NO: 762 - protein, 12 aa, Artificial Sequence
  Description of Artificial Sequence: Synthetic peptide
  N-term Ac
  MOD_RES (4)..(4): Alpha-Me R8-octenyl-alanine olefin amino acids connected by an all-carbon i to i+7 crosslinker comprising one double bond
  MOD_RES (11)..(11): Alpha-Me S5-pentenyl-alanine olefin amino acids connected by an all-carbon i to i+4 crosslinker comprising one double bond
  C-term NH2
  Crosslinked Sequence
LTFAAYWSQLAS

SEQ ID NO: 763 - protein, 12 aa, Artificial Sequence
  Description of Artificial Sequence: Synthetic peptide
  N-term Ac
  MOD_RES (4)..(4): Alpha-Me R8-octenyl-alanine olefin amino acids connected by an all-carbon i to i+7 crosslinker comprising one double bond
  MOD_RES (11)..(11): Alpha-Me S5-pentenyl-alanine olefin amino acids connected by an all-carbon i to i+4 crosslinker comprising one double bond
  C-term NH2
  Crosslinked Sequence
ETFAAYWAQLAS

SEQ ID NO: 764 - protein, 12 aa, Artificial Sequence
  Description of Artificial Sequence: Synthetic peptide
  N-term Ac
  MOD_RES (4)..(4): Alpha-Me R8-octenyl-alanine olefin amino acids connected by an all-carbon i to i+7 crosslinker comprising one double bond
  MOD_RES (11)..(11): Alpha-Me S5-pentenyl-alanine olefin amino acids connected by an all-carbon i to i+4 crosslinker comprising one double bond
  C-term NH2
  Crosslinked Sequence
LTFAEYWAQLAS

SEQ ID NO: 765 - protein, 12 aa, Artificial Sequence
  Description of Artificial Sequence: Synthetic peptide
  N-term Ac
  MOD_RES (4)..(4): Alpha-Me R8-octenyl-alanine olefin amino acids connected by an all-carbon i to i+7 crosslinker comprising one double bond
  MOD_RES (11)..(11): Alpha-Me S5-pentenyl-alanine olefin amino acids connected by an all-carbon i to i+4 crosslinker comprising one double bond
  C-term NHAm
  Crosslinked Sequence
LTFAHYWAQLAS

SEQ ID NO: 766 - protein, 12 aa, Artificial Sequence
  Description of Artificial Sequence: Synthetic peptide
  N-term Ac
  MOD_RES (4)..(4): Alpha-Me R8-octenyl-alanine olefin amino acids connected by an all-carbon i to i+7 crosslinker comprising one double bond
  MOD_RES (11)..(11): Alpha-Me S5-pentenyl-alanine olefin amino acids connected by an all-carbon i to i+4 crosslinker comprising one double bond
  C-term NHiAm
  Crosslinked Sequence
LTFAHYWAQLAS

SEQ ID NO: 767 - protein, 12 aa, Artificial Sequence
  Description of Artificial Sequence: Synthetic peptide
  N-term Ac
  MOD_RES (4)..(4): Alpha-Me R8-octenyl-alanine olefin amino acids connected by an all-carbon i to i+7 crosslinker comprising one double bond
  MOD_RES (11)..(11): Alpha-Me S5-pentenyl-alanine olefin amino acids connected by an all-carbon i to i+4 crosslinker comprising one double bond
  C-term NHnPr3Ph
  Crosslinked Sequence
LTFAHYWAQLAS

SEQ ID NO: 768 - protein, 12 aa, Artificial Sequence
  Description of Artificial Sequence: Synthetic peptide
  N-term Ac
  MOD_RES (4)..(4): Alpha-Me R8-octenyl-alanine olefin amino acids connected by an all-carbon i to i+7 crosslinker comprising one double bond
  MOD_RES (11)..(11): Alpha-Me S5-pentenyl-alanine olefin amino acids connected by an all-carbon i to i+4 crosslinker comprising one double bond
  C-term NHnBu3,3Me
  Crosslinked Sequence
LTFAHYWAQLAS

SEQ ID NO: 769 - protein, 12 aa, Artificial Sequence
  Description of Artificial Sequence: Synthetic peptide
  N-term Ac
  MOD_RES (4)..(4): Alpha-Me R8-octenyl-alanine olefin amino acids connected by an all-carbon i to i+7 crosslinker comprising one double bond
  MOD_RES (11)..(11): Alpha-Me S5-pentenyl-alanine olefin amino acids connected by an all-carbon i to i+4 crosslinker comprising one double bond
  C-term NHnBu
  Crosslinked Sequence
LTFAHYWAQLAS

SEQ ID NO: 770 - protein, 12 aa, Artificial Sequence
  Description of Artificial Sequence: Synthetic peptide
  N-term Ac
  MOD_RES (4)..(4): Alpha-Me R8-octenyl-alanine olefin amino acids connected by an all-carbon i to i+7 crosslinker comprising one double bond
  MOD_RES (11)..(11): Alpha-Me S5-pentenyl-alanine olefin amino acids connected by an all-carbon i to i+4 crosslinker comprising one double bond
  C-term NHnPr
  Crosslinked Sequence
LTFAHYWAQLAS

SEQ ID NO: 771 - protein, 12 aa, Artificial Sequence
  Description of Artificial Sequence: Synthetic peptide
  N-term Ac
  MOD_RES (4)..(4): Alpha-Me R8-octenyl-alanine olefin amino acids connected by an all-carbon i to i+7 crosslinker comprising one double bond
  MOD_RES (11)..(11): Alpha-Me S5-pentenyl-alanine olefin amino acids connected by an all-carbon i to i+4 crosslinker comprising one double bond
  C-term NHnEt2Ch
  Crosslinked Sequence
LTFAHYWAQLAS

SEQ ID NO: 772 - protein, 12 aa, Artificial Sequence
  Description of Artificial Sequence: Synthetic peptide
  N-term Ac
  MOD_RES (4)..(4): Alpha-Me R8-octenyl-alanine olefin amino acids connected by an all-carbon i to i+7 crosslinker comprising one double bond
  MOD_RES (11)..(11): Alpha-Me S5-pentenyl-alanine olefin amino acids connected by an all-carbon i to i+4 crosslinker comprising one double bond
  C-term NHHex
  Crosslinked Sequence
LTFAHYWAQLAS

SEQ ID NO: 773 - protein, 12 aa, Artificial Sequence
  Description of Artificial Sequence: Synthetic peptide
  N-term Ac
  MOD_RES (4)..(4): Alpha-Me R8-octenyl-alanine olefin amino acids connected by an all-carbon i to i+7 crosslinker comprising one double bond
  MOD_RES (11)..(11): Alpha-Me S5-pentenyl-alanine olefin amino acids connected by an all-carbon i to i+4 crosslinker comprising one double bond
  C-term NHmdPeg2
  Crosslinked Sequence
LTFAAYWAQLAS

SEQ ID NO: 774 - protein, 12 aa, Artificial Sequence
  Description of Artificial Sequence: Synthetic peptide
  N-term Ac
  MOD_RES (4)..(4): Alpha-Me R8-octenyl-alanine olefin amino acids connected by an all-carbon i to i+7 crosslinker comprising one double bond
  MOD_RES (11)..(11): Alpha-Me S5-pentenyl-alanine olefin amino acids connected by an all-carbon i to i+4 crosslinker comprising one double bond
  C-term NHmdPeg2
  Crosslinked Sequence
LTFAAYWAQLAA

SEQ ID NO: 775 - protein, 12 aa, Artificial Sequence
  Description of Artificial Sequence: Synthetic peptide
  N-term Ac
  MOD_RES (4)..(4): Alpha-Me R5-pentenyl-alanine olefin amino acids connected by an all-carbon i to i+4 crosslinker comprising one double bond
  MOD_RES (11)..(11): Alpha-Me S8-octenyl-alanine olefin amino acids connected by an all-carbon i to i+7 crosslinker comprising one double bond
  C-term NH2
  Crosslinked Sequence
LTFAAYWAALAS

SEQ ID NO: 776 - protein, 12 aa, Artificial Sequence
  Description of Artificial Sequence: Synthetic peptide
  N-term Ac
  MOD_RES (4)..(4): Alpha-Me R8-octenyl-alanine olefin amino acids connected by an all-carbon i to i+7 crosslinker comprising one double bond
  MOD_RES (8)..(8): (S)-2-amino-3-(7-methoxy-2-oxo-2H-chromene-3-yl) propanoic acid
  MOD_RES (11)..(11): Alpha-Me S5-pentenyl-alanine olefin amino acids connected by an all-carbon i to i+4 crosslinker comprising one double bond
  C-term NH2
  Crosslinked Sequence
LTFAAYWXQLAS

SEQ ID NO: 777 - protein, 12 aa, Artificial Sequence
  Description of Artificial Sequence: Synthetic peptide
  N-term Ac
  MOD_RES (4)..(4): Alpha-Me R8-octenyl-alanine olefin amino acids connected by an all-carbon i to i+7 crosslinker comprising one double bond
  MOD_RES (5)..(5): (S)-2-amino-3-(7-methoxy-2-oxo-2H-chromene-3-yl) propanoic acid
  MOD_RES (11)..(11): Alpha-Me S5-pentenyl-alanine olefin amino acids connected by an all-carbon i to i+4 crosslinker comprising one double bond
  C-term NH2
  Crosslinked Sequence
LTFAXYWAQLAS

SEQ ID NO: 778 - protein, 12 aa, Artificial Sequence
  Description of Artificial Sequence: Synthetic peptide
  N-term Ac
  MOD_RES (1)..(1): (S)-2-amino-3-(7-methoxy-2-oxo-2H-chromene-3-yl) propanoic acid
  MOD_RES (4)..(4): Alpha-Me R8-octenyl-alanine olefin amino acids connected by an all-carbon i to i+7 crosslinker comprising one double bond
  MOD_RES (11)..(11): Alpha-Me S5-pentenyl-alanine olefin amino acids connected by an all-carbon i to i+4 crosslinker comprising one double bond
  C-term NH2
  Crosslinked Sequence
XTFAAYWAQLAS

SEQ ID NO: 779 - protein, 12 aa, Artificial Sequence
  Description of Artificial Sequence: Synthetic peptide
  N-term H
  MOD_RES (4)..(4): Alpha-Me R8-octenyl-alanine olefin amino acids connected by an all-carbon i to i+7 crosslinker comprising one double bond
  MOD_RES (11)..(11): Alpha-Me S5-pentenyl-alanine olefin amino acids connected by an all-carbon i to i+4 crosslinker comprising one double bond
  C-term NH2
  Crosslinked Sequence
LTFAAYWAQLAA

SEQ ID NO: 780 - protein, 12 aa, Artificial Sequence
  Description of Artificial Sequence: Synthetic peptide
  N-term Ac
  MOD_RES (4)..(4): Alpha-Me R8-octenyl-alanine olefin amino acids connected by an all-carbon i to i+7 crosslinker comprising one double bond
  MOD_RES (11)..(11): Alpha-Me S5-pentenyl-alanine olefin amino acids connected by an all-carbon i to i+4 crosslinker comprising one double bond
  C-term NH2
  Crosslinked Sequence
HHFAAYWAQLAS

SEQ ID NO: 781 - protein, 12 aa, Artificial Sequence
  Description of Artificial Sequence: Synthetic peptide
  N-term Ac
  MOD_RES (3)..(3): 2-Naphthylalanine
  MOD_RES (4)..(4): Alpha-Me R8-octenyl-alanine olefin amino acids connected by an all-carbon i to i+7 crosslinker comprising one double bond
  MOD_RES (11)..(11): Alpha-Me S5-pentenyl-alanine olefin amino acids connected by an all-carbon i to i+4 crosslinker comprising one double bond
  C-term NH2
  Crosslinked Sequence
LTAAAYWSQLAS

SEQ ID NO: 782 - protein, 12 aa, Artificial Sequence
  Description of Artificial Sequence: Synthetic peptide
  N-term Ac
  MOD_RES (4)..(4): Alpha-Me R8-octenyl-alanine olefin amino acids connected by an all-carbon i to i+7 crosslinker comprising one double bond
  MOD_RES (6)..(6): (S)-2-amino-3-(7-methoxy-2-oxo-2H-chromene-3-yl) propanoic acid
  MOD_RES (11)..(11): Alpha-Me S5-pentenyl-alanine olefin amino acids connected by an all-carbon i to i+4 crosslinker comprising one double bond
  C-term NH2
  Crosslinked Sequence
LTFAHXWAQLAS

SEQ ID NO: 783 - protein, 12 aa, Artificial Sequence
  Description of Artificial Sequence: Synthetic peptide
  N-term Ac
  MOD_RES (4)..(4): Alpha-Me R8-octenyl-alanine olefin amino acids connected by an all-carbon i to i+7 crosslinker comprising one double bond
  MOD_RES (8)..(8): (S)-2-amino-3-(7-(diethylamino)-2-oxo-2H-chromene-3-carboxamido) propanoic acid
  MOD_RES (11)..(11): Alpha-Me S5-pentenyl-alanine olefin amino acids connected by an all-carbon i to i+4 crosslinker comprising one double bond
  C-term NH2
  Crosslinked Sequence
LTFAAYWXQLAS

SEQ ID NO: 784 - protein, 12 aa, Artificial Sequence
  Description of Artificial Sequence: Synthetic peptide
  N-term Ac
  MOD_RES (4)..(4): Alpha-Me R8-octenyl-alanine olefin amino acids connected by an all-carbon i to i+7 crosslinker comprising one double bond
  MOD_RES (5)..(5): (S)-2-amino-3-(7-(diethylamino)-2-oxo-2H-chromene-3-carboxamido) propanoic acid
  MOD_RES (11)..(11): Alpha-Me S5-pentenyl-alanine olefin amino acids connected by an all-carbon i to i+4 crosslinker comprising one double bond
  C-term NH2
  Crosslinked Sequence
LTFAXYWAQLAS

SEQ ID NO: 785 - protein, 12 aa, Artificial Sequence
  Description of Artificial Sequence: Synthetic peptide
  N-term Ac
  MOD_RES (1)..(1): (S)-2-amino-3-(7-(diethylamino)-2-oxo-2H-chromene-3-carboxamido) propanoic acid
  MOD_RES (4)..(4): Alpha-Me R8-octenyl-alanine olefin amino acids connected by an all-carbon i to i+7 crosslinker comprising one double bond
  MOD_RES (11)..(11): Alpha-Me S5-pentenyl-alanine olefin amino acids connected by an all-carbon i to i+4 crosslinker comprising one double bond
  C-term NH2
  Crosslinked Sequence
XTFAAYWAQLAS

SEQ ID NO: 786 - protein, 12 aa, Artificial Sequence
  Description of Artificial Sequence: Synthetic peptide
  N-term Ac
  MOD_RES (4)..(4): Alpha-Me R8-octenyl-alanine olefin amino acids connected by an all-carbon i to i+7 crosslinker comprising one double bond
  MOD_RES (6)..(6): (S)-2-amino-3-(7-(diethylamino)-2-oxo-2H-chromene-3-carboxamido) propanoic acid
  MOD_RES (11)..(11): Alpha-Me S5-pentenyl-alanine olefin amino acids connected by an all-carbon i to i+4 crosslinker comprising one double bond
  C-term NH2
  Crosslinked Sequence
LTFAAXWAQLAS

SEQ ID NO: 787 - protein, 12 aa, Artificial Sequence
  Description of Artificial Sequence: Synthetic peptide
  N-term Dmaac
  MOD_RES (4)..(4): Alpha-Me R8-octenyl-alanine olefin amino acids connected by an all-carbon i to i+7 crosslinker comprising one double bond
  MOD_RES (11)..(11): Alpha-Me S5-pentenyl-alanine olefin amino acids connected by an all-carbon i to i+4 crosslinker comprising one double bond
  C-term NH2
  Crosslinked Sequence
LTFAAYWAQLAS

SEQ ID NO: 788 - protein, 12 aa, Artificial Sequence
  Description of Artificial Sequence: Synthetic peptide
  N-term Hexac
  MOD_RES (4)..(4): Alpha-Me R8-octenyl-alanine olefin amino acids connected by an all-carbon i to i+7 crosslinker comprising one double bond
  MOD_RES (11)..(11): Alpha-Me S5-pentenyl-alanine olefin amino acids connected by an all-carbon i to i+4 crosslinker comprising one double bond
  C-term NH2
  Crosslinked Sequence
LTFAAYWAQLAS

SEQ ID NO: 789 - protein, 12 aa, Artificial Sequence
  Description of Artificial Sequence: Synthetic peptide
  N-term Napac
  MOD_RES (4)..(4): Alpha-Me R8-octenyl-alanine olefin amino acids connected by an all-carbon i to i+7 crosslinker comprising one double bond
  MOD_RES (11)..(11): Alpha-Me S5-pentenyl-alanine olefin amino acids connected by an all-carbon i to i+4 crosslinker comprising one double bond
  C-term NH2
  Crosslinked Sequence
LTFAAYWAQLAS

SEQ ID NO: 790 - protein, 12 aa, Artificial Sequence
  Description of Artificial Sequence: Synthetic peptide
  N-term Pam
  MOD_RES (4)..(4): Alpha-Me R8-octenyl-alanine olefin amino acids connected by an all-carbon i to i+7 crosslinker comprising one double bond
  MOD_RES (11)..(11): Alpha-Me S5-pentenyl-alanine olefin amino acids connected by an all-carbon i to i+4 crosslinker comprising one double bond
  C-term NH2
  Crosslinked Sequence
LTFAAYWAQLAS

SEQ ID NO: 791 - protein, 12 aa, Artificial Sequence
  Description of Artificial Sequence: Synthetic peptide
  N-term Ac
  MOD_RES (3)..(3): 2-Naphthylalanine
  MOD_RES (4)..(4): Alpha-Me R8-octenyl-alanine olefin amino acids connected by an all-carbon i to i+7 crosslinker comprising one double bond
  MOD_RES (11)..(11): Alpha-Me S5-pentenyl-alanine olefin amino acids connected by an all-carbon i to i+4 crosslinker comprising one double bond
  C-term NH2
  Crosslinked Sequence
LTAAHYAAQLAS

SEQ ID NO: 792 - protein, 12 aa, Artificial Sequence
  Description of Artificial Sequence: Synthetic peptide
  N-term Ac
  MOD_RES (3)..(3): 2-Naphthylalanine
  MOD_RES (4)..(4): Alpha-Me R8-octenyl-alanine olefin amino acids that are not connected by any crosslinker
  MOD_RES (11)..(11): Alpha-Me S5-pentenyl-alanine olefin amino acids that are not connected by any crosslinker
  C-term NH2
LTAAHYWAQLAS

SEQ ID NO: 793 - protein, 12 aa, Artificial Sequence
  Description of Artificial Sequence: Synthetic peptide
  N-term Ac
  MOD_RES (3)..(3): 2-Naphthylalanine
  MOD_RES (4)..(4): Alpha-Me R8-octenyl-alanine olefin amino acids connected by an all-carbon i to i+7 crosslinker comprising one double bond
  MOD_RES (11)..(11): Alpha-Me S5-pentenyl-alanine olefin amino acids connected by an all-carbon i to i+4 crosslinker comprising one double bond
  C-term NH2
  Crosslinked Sequence
LTAAHYFAQLAS

SEQ ID NO: 794 - protein, 12 aa, Artificial Sequence
  Description of Artificial Sequence: Synthetic peptide
  N-term Ac
  MOD_RES (3)..(3): 2-Naphthylalanine
  MOD_RES (4)..(4): Alpha-Me R8-octenyl-alanine olefin amino acids connected by an all-carbon i to i+7 crosslinker comprising one double bond
  MOD_RES (11)..(11): Alpha-Me S5-pentenyl-alanine olefin amino acids connected by an all-carbon i to i+4 crosslinker comprising one double bond
  C-term NH2
  Crosslinked Sequence
LTAAHWAAQLAS

SEQ ID NO: 795 - protein, 12 aa, Artificial Sequence
  Description of Artificial Sequence: Synthetic peptide
  N-term Ac
  MOD_RES (3)..(3): 2-Naphthylalanine
  MOD_RES (4)..(4): Alpha-Me R8-octenyl-alanine olefin amino acids connected by an all-carbon i to i+7 crosslinker comprising one double bond
  MOD_RES (11)..(11): Alpha-Me S5-pentenyl-alanine olefin amino acids connected by an all-carbon i to i+4 crosslinker comprising one double bond
  C-term NH2
  Crosslinked Sequence
LTAAHYAWQLAS

SEQ ID NO: 796 - protein, 12 aa, Artificial Sequence
  Description of Artificial Sequence: Synthetic peptide
  N-term Ac
  MOD_RES (3)..(3): 2-Naphthylalanine
  MOD_RES (4)..(4): Alpha-Me R8-octenyl-alanine olefin amino acids connected by an all-carbon i to i+7 crosslinker comprising one double bond
  MOD_RES (11)..(11): Alpha-Me S5-pentenyl-alanine olefin amino acids connected by an all-carbon i to i+4 crosslinker comprising one double bond
  C-term NH2
  Crosslinked Sequence
LTAAHYAAQWAS

SEQ ID NO: 797 - protein, 12 aa, Artificial Sequence
  Description of Artificial Sequence: Synthetic peptide
  N-term Ac
  MOD_RES (4)..(4): Alpha-Me R8-octenyl-alanine olefin amino acids connected by an all-carbon i to i+7 crosslinker comprising one double bond
  MOD_RES (11)..(11): Alpha-Me S5-pentenyl-alanine olefin amino acids connected by an all-carbon i to i+4 crosslinker comprising one double bond
  C-term NH2
  Crosslinked Sequence
LTWAHYWAQLAS

SEQ ID NO: 798 - protein, 12 aa, Artificial Sequence
  Description of Artificial Sequence: Synthetic peptide
  N-term Ac
  MOD_RES (3)..(3): 1-Naphthylalanine
  MOD_RES (4)..(4): Alpha-Me R8-octenyl-alanine olefin amino acids connected by an all-carbon i to i+7 crosslinker comprising one double bond
  MOD_RES (11)..(11): Alpha-Me S5-pentenyl-alanine olefin amino acids connected by an all-carbon i to i+4 crosslinker comprising one double bond
  C-term NH2
  Crosslinked Sequence
LTAAHYWAQLAS

SEQ ID NO: 799 - protein, 12 aa, Artificial Sequence
  Description of Artificial Sequence: Synthetic peptide
  N-term Ac
  MOD_RES (2)..(2): Alpha-Me R8-octenyl-alanine olefin amino acid connected by an all-carbon crosslinker comprising one double bond
  misc_feature (2)..(9): Crosslink between residues
  MOD_RES (7)..(7): Ac3c
  MOD_RES (9)..(9): Alpha-Me S5-pentenyl-alanine olefin amino acid connected by an all-carbon crosslinker comprising one double bond
  C-term NH2
FAAYWEXLAAAA

SEQ ID NO: 800 - protein, 12 aa, Artificial Sequence
  Description of Artificial Sequence: Synthetic peptide
  N-term Ac
  MOD_RES (2)..(2): Alpha-Me R8-octenyl-alanine olefin amino acid connected by an all-carbon crosslinker comprising one double bond
  misc_feature (2)..(9): Crosslink between residues
  MOD_RES (7)..(7): Ac3c
  MOD_RES (9)..(9): Alpha-Me S5-pentenyl-alanine olefin amino acid connected by an all-carbon crosslinker comprising one double bond
  MOD_RES (11)..(11): 2-aminoisobutyric acid
  C-term NH2
FAAYWEXLAAXA

SEQ ID NO: 801 - protein, 14 aa, Artificial Sequence
  Description of Artificial Sequence: Synthetic peptide
  N-term Ac
  MOD_RES (4)..(4): Alpha-Me R8-octenyl-alanine olefin amino acid connected by an all-carbon crosslinker comprising one double bond
  misc_feature (4)..(11): Crosslink between residues
  MOD_RES (11)..(11): Alpha-Me S5-pentenyl-alanine olefin amino acid connected by an all-carbon crosslinker comprising one double bond
  MOD_RES (14)..(14): Norleucine
  C-term NH2
LTFAAYWAQLASAL

SEQ ID NO: 802 - protein, 14 aa, Artificial Sequence
  Description of Artificial Sequence: Synthetic peptide
  N-term Ac
  MOD_RES (4)..(4): Alpha-Me R8-octenyl-alanine olefin amino acid connected by an all-carbon crosslinker comprising one double bond
  misc_feature (4)..(11): Crosslink between residues
  MOD_RES (11)..(11): Alpha-Me S5-pentenyl-alanine olefin amino acid connected by an all-carbon crosslinker comprising one double bond
  C-term NH2
LTFAAYWAQLASAL

SEQ ID NO: 803 - protein, 14 aa, Artificial Sequence
  Description of Artificial Sequence: Synthetic peptide
  N-term Ac
  MOD_RES (4)..(4): Alpha-Me R8-octenyl-alanine olefin amino acid connected by an all-carbon crosslinker comprising one double bond
  misc_feature (4)..(11): Crosslink between residues
  MOD_RES (11)..(11): Alpha-Me S5-pentenyl-alanine olefin amino acid connected by an all-carbon crosslinker comprising one double bond
  C-term NH2
LTFAAYWAQLASAM

SEQ ID NO: 804 - protein, 14 aa, Artificial Sequence
  Description of Artificial Sequence: Synthetic peptide
  N-term Ac
  MOD_RES (4)..(4): Alpha-Me R8-octenyl-alanine olefin amino acid connected by an all-carbon crosslinker comprising one double bond
  misc_feature (4)..(11): Crosslink between residues
  MOD_RES (11)..(11): Alpha-Me S5-pentenyl-alanine olefin amino acid connected by an all-carbon crosslinker comprising one double bond
  MOD_RES (14)..(14): hLeu
  C-term NH2
LTFAAYWAQLASAL

SEQ ID NO: 805 - protein, 14 aa, Artificial Sequence
  Description of Artificial Sequence: Synthetic peptide
  N-term Ac
  MOD_RES (4)..(4): Alpha-Me R8-octenyl-alanine olefin amino acid connected by an all-carbon crosslinker comprising one double bond
  misc_feature (4)..(11): Crosslink between residues
  MOD_RES (11)..(11): Alpha-Me S5-pentenyl-alanine olefin amino acid connected by an all-carbon crosslinker comprising one double bond
  C-term NH2
LTFAAYWAQLASAF

SEQ ID NO: 806 - protein, 14 aa, Artificial Sequence
  Description of Artificial Sequence: Synthetic peptide
  N-term Ac
  MOD_RES (4)..(4): Alpha-Me R8-octenyl-alanine olefin amino acid connected by an all-carbon crosslinker comprising one double bond
  misc_feature (4)..(11): Crosslink between residues
  MOD_RES (11)..(11): Alpha-Me S5-pentenyl-alanine olefin amino acid connected by an all-carbon crosslinker comprising one double bond
  C-term NH2
LTFAAYWAQLASAI

SEQ ID NO: 807 - protein, 14 aa, Artificial Sequence
  Description of Artificial Sequence: Synthetic peptide
  N-term Ac
  MOD_RES (4)..(4): Alpha-Me R8-octenyl-alanine olefin amino acid connected by an all-carbon crosslinker comprising one double bond
  misc_feature (4)..(11): Crosslink between residues
  MOD_RES (11)..(11): Alpha-Me S5-pentenyl-alanine olefin amino acid connected by an all-carbon crosslinker comprising one double bond
  MOD_RES (14)..(14): Cyclohexyl-Gly
  C-term NH2
LTFAAYWAQLASAG

SEQ ID NO: 808 - protein, 14 aa, Artificial Sequence
  Description of Artificial Sequence: Synthetic peptide
  N-term Ac
  MOD_RES (4)..(4): Alpha-Me R8-octenyl-alanine olefin amino acid connected by an all-carbon crosslinker comprising one double bond
  misc_feature (4)..(11): Crosslink between residues
  MOD_RES (11)..(11): Alpha-Me S5-pentenyl-alanine olefin amino acid connected by an all-carbon crosslinker comprising one double bond
  MOD_RES (14)..(14): 2-aminoisobutyric acid
  C-term NH2
LTFAAYWAQLASAX

SEQ ID NO: 809 - protein, 14 aa, Artificial Sequence
  Description of Artificial Sequence: Synthetic peptide
  N-term Ac
  MOD_RES (4)..(4): Alpha-Me R8-octenyl-alanine olefin amino acid connected by an all-carbon crosslinker comprising one double bond
  misc_feature (4)..(11): Crosslink between residues
  MOD_RES (11)..(11): Alpha-Me S5-pentenyl-alanine olefin amino acid connected by an all-carbon crosslinker comprising one double bond
  C-term NH2
LTFAAYWAQLASAA

SEQ ID NO: 810 - protein, 14 aa, Artificial Sequence
  Description of Artificial Sequence: Synthetic peptide
  N-term Ac
  MOD_RES (4)..(4): Alpha-Me R8-octenyl-alanine olefin amino acid connected by an all-carbon crosslinker comprising one double bond
  misc_feature (4)..(9): Crosslink between residues
  MOD_RES (9)..(9): Alpha-Me S5-pentenyl-alanine olefin amino acid connected by an all-carbon crosslinker comprising one double bond
  MOD_RES (11)..(11): Alpha-Me S5-pentenyl-alanine olefin amino acid connected by an all-carbon crosslinker comprising one double bond
  misc_feature (11)..(13): Crosslink between residues
  MOD_RES (13)..(13): Alpha-Me S5-pentenyl-alanine olefin amino acid connected by an all-carbon crosslinker comprising one double bond
  MOD_RES (14)..(14): Norleucine
  C-term NH2
LTFAAYWAALASAL

SEQ ID NO: 811 - protein, 14 aa, Artificial Sequence
  Description of Artificial Sequence: Synthetic peptide
  N-term Ac
  MOD_RES (4)..(4): Alpha-Me R8-octenyl-alanine olefin amino acid connected by an all-carbon crosslinker comprising one double bond
  misc_feature (4)..(9): Crosslink between residues
  MOD_RES (9)..(9): Alpha-Me S5-pentenyl-alanine olefin amino acid connected by an all-carbon crosslinker comprising one double bond
  MOD_RES (11)..(11): Alpha-Me S5-pentenyl-alanine olefin amino acid connected by an all-carbon crosslinker comprising one double bond
  misc_feature (11)..(13): Crosslink between residues
  MOD_RES (13)..(13): Alpha-Me S5-pentenyl-alanine olefin amino acid connected by an all-carbon crosslinker comprising one double bond
  C-term NH2
LTFAAYWAALASAA

SEQ ID NO: 812 - protein, 12 aa, Artificial Sequence
  Description of Artificial Sequence: Synthetic peptide
  N-term Ac
  MOD_RES (2)..(2): Alpha-Me R8-octenyl-alanine olefin amino acid connected by an all-carbon crosslinker comprising one double bond
  misc_feature (2)..(9): Crosslink between residues
  MOD_RES (7)..(7): Ac3c
  MOD_RES (9)..(9): Alpha-Me S5-pentenyl-alanine olefin amino acid connected by an all-carbon crosslinker comprising one double bond
  MOD_RES (12)..(12): Norleucine
  C-term NH2
FAAYWEXLAAAL

SEQ ID NO: 813 - protein, 12 aa, Artificial Sequence
  Description of Artificial Sequence: Synthetic peptide
  N-term Ac
  MOD_RES (2)..(2): Alpha-Me R8-octenyl-alanine olefin amino acid connected by an all-carbon crosslinker comprising one double bond
  misc_feature (2)..(9): Crosslink between residues
  MOD_RES (7)..(7): Ac3c
  MOD_RES (9)..(9): Alpha-Me S5-pentenyl-alanine olefin amino acid connected by an all-carbon crosslinker comprising one double bond
  C-term NH2
FAAYWEXLAAAL

SEQ ID NO: 814 - protein, 12 aa, Artificial Sequence
  Description of Artificial Sequence: Synthetic peptide
  N-term Ac
  MOD_RES (2)..(2): Alpha-Me R8-octenyl-alanine olefin amino acid connected by an all-carbon crosslinker comprising one double bond
  misc_feature (2)..(9): Crosslink between residues
  MOD_RES (7)..(7): Ac3c
  MOD_RES (9)..(9): Alpha-Me S5-pentenyl-alanine olefin amino acid connected by an all-carbon crosslinker comprising one double bond
  C-term NH2
FAAYWEXLAAAM

SEQ ID NO: 815 - protein, 12 aa, Artificial Sequence
  Description of Artificial Sequence: Synthetic peptide
  N-term Ac
  MOD_RES (2)..(2): Alpha-Me R8-octenyl-alanine olefin amino acid connected by an all-carbon crosslinker comprising one double bond
  misc_feature (2)..(9): Crosslink between residues
  MOD_RES (7)..(7): Ac3c
  MOD_RES (9)..(9): Alpha-Me S5-pentenyl-alanine olefin amino acid connected by an all-carbon crosslinker comprising one double bond
  MOD_RES (12)..(12): hLeu
  C-term NH2
FAAYWEXLAAAL

SEQ ID NO: 816 - protein, 12 aa, Artificial Sequence
  Description of Artificial Sequence: Synthetic peptide
  N-term Ac
  MOD_RES (2)..(2): Alpha-Me R8-octenyl-alanine olefin amino acid connected by an all-carbon crosslinker comprising one double bond
  misc_feature (2)..(9): Crosslink between residues
  MOD_RES (7)..(7): Ac3c
  MOD_RES (9)..(9): Alpha-Me S5-pentenyl-alanine olefin amino acid connected by an all-carbon crosslinker comprising one double bond
  C-term NH2
FAAYWEXLAAAF

SEQ ID NO: 817 - protein, 12 aa, Artificial Sequence
  Description of Artificial Sequence: Synthetic peptide
  N-term Ac
  MOD_RES (2)..(2): Alpha-Me R8-octenyl-alanine olefin amino acid connected by an all-carbon crosslinker comprising one double bond
  misc_feature (2)..(9): Crosslink between residues
  MOD_RES (7)..(7): Ac3c
  MOD_RES (9)..(9): Alpha-Me S5-pentenyl-alanine olefin amino acid connected by an all-carbon crosslinker comprising one double bond
  C-term NH2
FAAYWEXLAAAI

SEQ ID NO: 818 - protein, 12 aa, Artificial Sequence
  Description of Artificial Sequence: Synthetic peptide
  N-term Ac
  MOD_RES (2)..(2): Alpha-Me R8-octenyl-alanine olefin amino acid connected by an all-carbon crosslinker comprising one double bond
  misc_feature (2)..(9): Crosslink between residues
  MOD_RES (7)..(7): Ac3c
  MOD_RES (9)..(9): Alpha-Me S5-pentenyl-alanine olefin amino acid connected by an all-carbon crosslinker comprising one double bond
  MOD_RES (12)..(12): Cyclohexyl-Gly
  C-term NH2
FAAYWEXLAAAG

SEQ ID NO: 819 - protein, 12 aa, Artificial Sequence
  Description of Artificial Sequence: Synthetic peptide
  N-term Ac
  MOD_RES (2)..(2): Alpha-Me R8-octenyl-alanine olefin amino acid connected by an all-carbon crosslinker comprising one double bond
  misc_feature (2)..(9): Crosslink between residues
  MOD_RES (7)..(7): Ac3c
  MOD_RES (9)..(9): Alpha-Me S5-pentenyl-alanine olefin amino acid connected by an all-carbon crosslinker comprising one double bond
  MOD_RES (12)..(12): Cyclohexyl-Ala
  C-term NH2
FAAYWEXLAAAA

SEQ ID NO: 820 - protein, 12 aa, Artificial Sequence
  Description of Artificial Sequence: Synthetic peptide
  N-term Ac
  MOD_RES (2)..(2): Alpha-Me R8-octenyl-alanine olefin amino acid connected by an all-carbon crosslinker comprising one double bond
  misc_feature (2)..(9): Crosslink between residues
  MOD_RES (7)..(7): Ac3c
  MOD_RES (9)..(9): Alpha-Me S5-pentenyl-alanine olefin amino acid connected by an all-carbon crosslinker comprising one double bond
  MOD_RES (12)..(12): 2-aminoisobutyric acid
  C-term NH2
FAAYWEXLAAAX

SEQ ID NO: 821 - protein, 15 aa, Artificial Sequence
  Description of Artificial Sequence: Synthetic peptide
  N-term Ac
  MOD_RES (4)..(4): Alpha-Me R8-octenyl-alanine olefin amino acid connected by an all-carbon crosslinker comprising one double bond
  misc_feature (4)..(11): Crosslink between residues
  MOD_RES (11)..(11): Alpha-Me S5-pentenyl-alanine olefin amino acid connected by an all-carbon crosslinker comprising one double bond
  MOD_RES (14)..(14): 2-aminoisobutyric acid
  C-term NH2
LTFAAYWAQLAAAXV

SEQ ID NO: 822 - protein, 15 aa, Artificial Sequence
  Description of Artificial Sequence: Synthetic peptide
  N-term Ac
  MOD_RES (4)..(4): Alpha-Me R8-octenyl-alanine olefin amino acid connected by an all-carbon crosslinker comprising one double bond
  misc_feature (4)..(11): Crosslink between residues
  MOD_RES (11)..(11): Alpha-Me S5-pentenyl-alanine olefin amino acid connected by an all-carbon crosslinker comprising one double bond
  MOD_RES (14)..(14): 2-aminoisobutyric acid
  C-term NH2
LTFAAYWAQLAAAXV

SEQ ID NO: 823 - protein, 15 aa, Artificial Sequence
  Description of Artificial Sequence: Synthetic peptide
  N-term Ac
  MOD_RES (4)..(4): Alpha-Me R8-octenyl-alanine olefin amino acid connected by an all-carbon crosslinker comprising one double bond
  misc_feature (4)..(11): Crosslink between residues
  MOD_RES (11)..(11): Alpha-Me S5-pentenyl-alanine olefin amino acid connected by an all-carbon crosslinker comprising one double bond
  MOD_RES (13)..(13): 2-aminoisobutyric acid
  C-term NH2
LTFAAYWAQLASXAA

SEQ ID NO: 824 - protein, 15 aa, Artificial Sequence
  Description of Artificial Sequence: Synthetic peptide
  N-term Ac
  MOD_RES (4)..(4): Alpha-Me R8-octenyl-alanine olefin amino acid connected by an all-carbon crosslinker comprising one double bond
  misc_feature (4)..(11): Crosslink between residues
  MOD_RES (11)..(11): Alpha-Me S5-pentenyl-alanine olefin amino acid connected by an all-carbon crosslinker comprising one double bond
  MOD_RES (13)..(13): 2-aminoisobutyric acid
  C-term NH2
LTFAAYWAQLASXAA

SEQ ID NO: 825 - protein, 16 aa, Artificial Sequence
  Description of Artificial Sequence: Synthetic peptide
  N-term Ac
  MOD_RES (5)..(5): Alpha-Me R8-octenyl-alanine olefin amino acid connected by an all-carbon crosslinker comprising one double bond
  misc_feature (5)..(12): Crosslink between residues
  MOD_RES (12)..(12): Alpha-Me S5-pentenyl-alanine olefin amino acid connected by an all-carbon crosslinker comprising one double bond
  MOD_RES (15)..(16): Norleucine
  C-term NH2
HLTFAHHWHQLAAALL

SEQ ID NO: 826 - protein, 16 aa, Artificial Sequence
  Description of Artificial Sequence: Synthetic peptide
  N-term Ac
  MOD_RES (5)..(5): Alpha-Me R8-octenyl-alanine olefin amino acid connected by an all-carbon crosslinker comprising one double bond
  misc_feature (5)..(12): Crosslink between residues
  MOD_RES (12)..(12): Alpha-Me S5-pentenyl-alanine olefin amino acid connected by an all-carbon crosslinker comprising one double bond
  C-term NH2
DLTFAHHWHQLARRLV

SEQ ID NO: 827 - protein, 16 aa, Artificial Sequence
  Description of Artificial Sequence: Synthetic peptide
  N-term Ac
  MOD_RES (5)..(5): Alpha-Me R8-octenyl-alanine olefin amino acid connected by an all-carbon crosslinker comprising one double bond
  misc_feature (5)..(12): Crosslink between residues
  MOD_RES (12)..(12): Alpha-Me S5-pentenyl-alanine olefin amino acid connected by an all-carbon crosslinker comprising one double bond
  C-term NH2
HHTFAHHWHQLAAAML

SEQ ID NO: 828 - protein, 13 aa, Artificial Sequence
  Description of Artificial Sequence: Synthetic peptide
  N-term Ac
  MOD_RES (2)..(2): Alpha-Me R8-octenyl-alanine olefin amino acid connected by an all-carbon crosslinker comprising one double bond
  misc_feature (2)..(9): Crosslink between residues
  MOD_RES (9)..(9): Alpha-Me S5-pentenyl-alanine olefin amino acid connected by an all-carbon crosslinker comprising one double bond
  MOD_RES (13)..(13): Cyclohexyl-Ala
  C-term NH2
FAHHWHQLARRDA

SEQ ID NO: 829 - protein, 13 aa, Artificial Sequence
  Description of Artificial Sequence: Synthetic peptide
  N-term Ac
  MOD_RES (2)..(2): Alpha-Me R8-octenyl-alanine olefin amino acid connected by an all-carbon crosslinker comprising one double bond
  misc_feature (2)..(9): Crosslink between residues
  MOD_RES (9)..(9): Alpha-Me S5-pentenyl-alanine olefin amino acid connected by an all-carbon crosslinker comprising one double bond
  C-term NH2
FAHHWHQLAHRFV

SEQ ID NO: 830 - protein, 16 aa, Artificial Sequence
  Description of Artificial Sequence: Synthetic peptide
  N-term Ac
  MOD_RES (5)..(5): Alpha-Me R8-octenyl-alanine olefin amino acid connected by an all-carbon crosslinker comprising one double bond
  misc_feature (5)..(12): Crosslink between residues
  MOD_RES (12)..(12): Alpha-Me S5-pentenyl-alanine olefin amino acid connected by an all-carbon crosslinker comprising one double bond
  MOD_RES (15)..(15): hLeu
  C-term NH2
HLTFAHHWHQLAAALA

SEQ ID NO: 831 - protein, 16 aa, Artificial Sequence
  Description of Artificial Sequence: Synthetic peptide
  N-term Ac
  MOD_RES (5)..(5): Alpha-Me R8-octenyl-alanine olefin amino acid connected by an all-carbon crosslinker comprising one double bond
  misc_feature (5)..(12): Crosslink between residues
  MOD_RES (12)..(12): Alpha-Me S5-pentenyl-alanine olefin amino acid connected by an all-carbon crosslinker comprising one double bond
  MOD_RES (15)..(15): Cyclohexyl-Gly
  MOD_RES (16)..(16): D-amino acid
  C-term NH2
DLTFAHHWHQLARRGL

SEQ ID NO: 832 - protein, 16 aa, Artificial Sequence
  Description of Artificial Sequence: Synthetic peptide
  N-term Ac
  MOD_RES (5)..(5): Alpha-Me R8-octenyl-alanine olefin amino acid connected by an all-carbon crosslinker comprising one double bond
  misc_feature (5)..(12): Crosslink between residues
  MOD_RES (12)..(12): Alpha-Me S5-pentenyl-alanine olefin amino acid connected by an all-carbon crosslinker comprising one double bond
  MOD_RES (15)..(15): Cyclohexyl-Gly
  MOD_RES (16)..(16): D-amino acid
  C-term NH2
DLTFAHHWHQLARRGL

SEQ ID NO: 833 - protein, 16 aa, Artificial Sequence
  Description of Artificial Sequence: Synthetic peptide
  N-term Ac
  MOD_RES (5)..(5): Alpha-Me R8-octenyl-alanine olefin amino acid connected by an all-carbon crosslinker comprising one double bond
  misc_feature (5)..(12): Crosslink between residues
  MOD_RES (12)..(12): Alpha-Me S5-pentenyl-alanine olefin amino acid connected by an all-carbon crosslinker comprising one double bond
  MOD_RES (15)..(15): Cyclohexyl-Ala
  MOD_RES (16)..(16): D-amino acid
  C-term NH2
HHTFAHHWHQLAAAAV

SEQ ID NO: 834 - protein, 13 aa, Artificial Sequence
  Description of Artificial Sequence: Synthetic peptide
  N-term Ac
  MOD_RES (2)..(2): Alpha-Me R8-octenyl-alanine olefin amino acid connected by an all-carbon crosslinker comprising one double bond
  misc_feature (2)..(9): Crosslink between residues
  MOD_RES (9)..(9): Alpha-Me S5-pentenyl-alanine olefin amino acid connected by an all-carbon crosslinker comprising one double bond
  MOD_RES (13)..(13): D-amino acid
  C-term NH2
FAHHWHQLARRDA

SEQ ID NO: 835 - protein, 13 aa, Artificial Sequence
  Description of Artificial Sequence: Synthetic peptide
  N-term Ac
  MOD_RES (2)..(2): Alpha-Me R8-octenyl-alanine olefin amino acid connected by an all-carbon crosslinker comprising one double bond
  misc_feature (2)..(9): Crosslink between residues
  MOD_RES (9)..(9): Alpha-Me S5-pentenyl-alanine olefin amino acid connected by an all-carbon crosslinker comprising one double bond
  MOD_RES (12)..(12): 2-aminoisobutyric acid
  C-term NH2
FAHHWHQLAHRXG

SEQ ID NO: 836 - protein, 13 aa, Artificial Sequence
  Description of Artificial Sequence: Synthetic peptide
  N-term Ac
  MOD_RES (2)..(2): Alpha-Me R8-octenyl-alanine olefin amino acid connected by an all-carbon crosslinker comprising one double bond
  misc_feature (2)..(9): Crosslink between residues
  MOD_RES (9)..(9): Alpha-Me S5-pentenyl-alanine olefin amino acid connected by an all-carbon crosslinker comprising one double bond
  MOD_RES (12)..(12): Norleucine
  C-term NH2
FAAYWAQLAHHLL

SEQ ID NO: 837 - protein, 13 aa, Artificial Sequence
  Description of Artificial Sequence: Synthetic peptide
  N-term Ac
  MOD_RES (2)..(2): Alpha-Me R8-octenyl-alanine olefin amino acid connected by an all-carbon crosslinker comprising one double bond
  misc_feature (2)..(9): Crosslink between residues
  MOD_RES (9)..(9): Alpha-Me S5-pentenyl-alanine olefin amino acid connected by an all-carbon crosslinker comprising one double bond
  MOD_RES (13)..(13): Norleucine
  C-term NH2
FAAYWSALAHQAL

SEQ ID NO: 838 - protein, 13 aa, Artificial Sequence
  Description of Artificial Sequence: Synthetic peptide
  N-term Ac
  MOD_RES (2)..(2): Alpha-Me R8-octenyl-alanine olefin amino acid connected by an all-carbon crosslinker comprising one double bond
  misc_feature (2)..(9): Crosslink between residues
  MOD_RES (9)..(9): Alpha-Me S5-pentenyl-alanine olefin amino acid connected by an all-carbon crosslinker comprising one double bond
  MOD_RES (12)..(12): Cyclohexyl-Gly
  MOD_RES (13)..(13): D-amino acid
  C-term NH2
FAAYWVQLAQHGL

SEQ ID NO: 839 - protein, 13 aa, Artificial Sequence
  Description of Artificial Sequence: Synthetic peptide
  N-term Ac
  MOD_RES (2)..(2): Alpha-Me R8-octenyl-alanine olefin amino acid connected by an all-carbon crosslinker comprising one double bond
  misc_feature (2)..(9): Crosslink between residues
  MOD_RES (9)..(9): Alpha-Me S5-pentenyl-alanine olefin amino acid connected by an all-carbon crosslinker comprising one double bond
  MOD_RES (12)..(12): Norleucine
  MOD_RES (13)..(13): D-amino acid
  C-term NH2
FAAYWTALAQQLV

SEQ ID NO: 840 - protein, 13 aa, Artificial Sequence
  Description of Artificial Sequence: Synthetic peptide
  N-term Ac
  MOD_RES (2)..(2): Alpha-Me R8-octenyl-alanine olefin amino acid connected by an all-carbon crosslinker comprising one double bond
  misc_feature (2)..(9): Crosslink between residues
  MOD_RES (9)..(9): Alpha-Me S5-pentenyl-alanine olefin amino acid connected by an all-carbon crosslinker comprising one double bond
  MOD_RES (11)..(11): 2-aminoisobutyric acid
  MOD_RES (13)..(13): D-amino acid
  C-term NH2
FAAYWYQLAHXAA

SEQ ID NO: 841 - protein, 15 aa, Artificial Sequence
  Description of Artificial Sequence: Synthetic peptide
  N-term Ac
  MOD_RES (4)..(4): Alpha-Me R8-octenyl-alanine olefin amino acid connected by an all-carbon crosslinker comprising one double bond
  misc_feature (4)..(11): Crosslink between residues
  MOD_RES (11)..(11): Alpha-Me S5-pentenyl-alanine olefin amino acid connected by an all-carbon crosslinker comprising one double bond
  MOD_RES (15)..(15): D-amino acid
  C-term NH2
LTFAAYWAQLAHHLA

SEQ ID NO: 842 - protein, 15 aa, Artificial Sequence
  Description of Artificial Sequence: Synthetic peptide
  N-term Ac
  MOD_RES (4)..(4): Alpha-Me R8-octenyl-alanine olefin amino acid connected by an all-carbon crosslinker comprising one double bond
  misc_feature (4)..(11): Crosslink between residues
  MOD_RES (11)..(11): Alpha-Me S5-pentenyl-alanine olefin amino acid connected by an all-carbon crosslinker comprising one double bond
  MOD_RES (15)..(15): D-amino acid
  C-term NH2
LTFAAYWAQLAHHLA

SEQ ID NO: 843 - protein, 15 aa, Artificial Sequence
  Description of Artificial Sequence: Synthetic peptide
  N-term Ac
  MOD_RES (4)..(4): Alpha-Me R8-octenyl-alanine olefin amino acid connected by an all-carbon crosslinker comprising one double bond
  misc_feature (4)..(11): Crosslink between residues
  MOD_RES (11)..(11): Alpha-Me S5-pentenyl-alanine olefin amino acid connected by an all-carbon crosslinker comprising one double bond
  MOD_RES (14)..(14): Norleucine
  MOD_RES (15)..(15): D-amino acid
  C-term NH2
LTFAAYWAQLAHQLV

SEQ ID NO: 844 - protein, 15 aa, Artificial Sequence
  Description of Artificial Sequence: Synthetic peptide
  N-term Ac
  MOD_RES (4)..(4): Alpha-Me R8-octenyl-alanine olefin amino acid connected by an all-carbon crosslinker comprising one double bond
  misc_feature (4)..(11): Crosslink between residues
  MOD_RES (11)..(11): Alpha-Me S5-pentenyl-alanine olefin amino acid connected by an all-carbon crosslinker comprising one double bond
  MOD_RES (14)..(14): Norleucine
  MOD_RES (15)..(15): D-amino acid
  C-term NH2
LTFAAYWAQLAHQLV

SEQ ID NO: 845 - protein, 15 aa, Artificial Sequence
  Description of Artificial Sequence: Synthetic peptide
  N-term Ac
  MOD_RES (4)..(4): Alpha-Me R8-octenyl-alanine olefin amino acid connected by an all-carbon crosslinker comprising one double bond
  misc_feature (4)..(11): Crosslink between residues
  MOD_RES (11)..(11): Alpha-Me S5-pentenyl-alanine olefin amino acid connected by an all-carbon crosslinker comprising one double bond
  MOD_RES (15)..(15): D-amino acid
  C-term NH2
LTFAAYWAQLAQQML

SEQ ID NO: 846 - protein, 15 aa, Artificial Sequence
  Description of Artificial Sequence: Synthetic peptide
  N-term Ac
  MOD_RES (4)..(4): Alpha-Me R8-octenyl-alanine olefin amino acid connected by an all-carbon crosslinker comprising one double bond
  misc_feature (4)..(11): Crosslink between residues
  MOD_RES (11)..(11): Alpha-Me S5-pentenyl-alanine olefin amino acid connected by an all-carbon crosslinker comprising one double bond
  MOD_RES (15)..(15): D-amino acid
  C-term NH2
LTFAAYWAQLAQQML

SEQ ID NO: 847 - protein, 15 aa, Artificial Sequence
  Description of Artificial Sequence: Synthetic peptide
  N-term Ac
  MOD_RES (4)..(4): Alpha-Me R8-octenyl-alanine olefin amino acid connected by an all-carbon crosslinker comprising one double bond
  misc_feature (4)..(11): Crosslink between residues
  MOD_RES (11)..(11): Alpha-Me S5-pentenyl-alanine olefin amino acid connected by an all-carbon crosslinker comprising one double bond
  MOD_RES (13)..(13): 2-aminoisobutyric acid
  MOD_RES (14)..(14): hLeu
  C-term NH2
LTFAAYWAQLAHXLV

SEQ ID NO: 848 - protein, 15 aa, Artificial Sequence
  Description of Artificial Sequence: Synthetic peptide
  N-term Ac
  MOD_RES (4)..(4): Alpha-Me R8-octenyl-alanine olefin amino acid connected by an all-carbon crosslinker comprising one double bond
  misc_feature (4)..(11): Crosslink between residues
  MOD_RES (11)..(11): Alpha-Me S5-pentenyl-alanine olefin amino acid connected by an all-carbon crosslinker comprising one double bond
  C-term NH2
LTFAAYWAQLAAHFA

SEQ ID NO: 849 - protein, 16 aa, Artificial Sequence
  Description of Artificial Sequence: Synthetic peptide
  N-term Ac
  MOD_RES (5)..(5): Alpha-Me R8-octenyl-alanine olefin amino acid connected by an all-carbon crosslinker comprising one double bond
  misc_feature (5)..(12): Crosslink between residues
  MOD_RES (12)..(12): Alpha-Me S5-pentenyl-alanine olefin amino acid connected by an all-carbon crosslinker comprising one double bond
  MOD_RES (15)..(15): Norleucine
  MOD_RES (16)..(16): D-amino acid
  C-term NH2
HLTFAHHWHQLAAALL

SEQ ID NO: 850 - protein, 16 aa, Artificial Sequence
  Description of Artificial Sequence: Synthetic peptide
  N-term Ac
  MOD_RES (5)..(5): Alpha-Me R8-octenyl-alanine olefin amino acid connected by an all-carbon crosslinker comprising one double bond
  misc_feature (5)..(12): Crosslink between residues
  MOD_RES (12)..(12): Alpha-Me S5-pentenyl-alanine olefin amino acid connected by an all-carbon crosslinker comprising one double bond
  MOD_RES (16)..(16): D-amino acid
  C-term NH2
DLTFAHHWHQLARRLA

SEQ ID NO: 851 - protein, 16 aa, Artificial Sequence
  Description of Artificial Sequence: Synthetic peptide
  N-term Ac
  MOD_RES (5)..(5): Alpha-Me R8-octenyl-alanine olefin amino acid connected by an all-carbon crosslinker comprising one double bond
  misc_feature (5)..(12): Crosslink between residues
  MOD_RES (12)..(12): Alpha-Me S5-pentenyl-alanine olefin amino acid connected by an all-carbon crosslinker comprising one double bond
  MOD_RES (16)..(16): D-amino acid
  C-term NH2
HHTFAHHWHQLAAAMV

SEQ ID NO: 852 - protein, 13 aa, Artificial Sequence
  Description of Artificial Sequence: Synthetic peptide
  N-term Ac
  MOD_RES (2)..(2): Alpha-Me R8-octenyl-alanine olefin amino acid connected by an all-carbon crosslinker comprising one double bond
  misc_feature (2)..(9): Crosslink between residues
  MOD_RES (9)..(9): Alpha-Me S5-pentenyl-alanine olefin amino acid connected by an all-carbon crosslinker comprising one double bond
  C-term NH2
FAHHWHQLARRDA

SEQ ID NO: 853 - protein, 13 aa, Artificial Sequence
  Description of Artificial Sequence: Synthetic peptide
  N-term Ac
  MOD_RES (2)..(2): Alpha-Me R8-octenyl-alanine olefin amino acid connected by an all-carbon crosslinker comprising one double bond
  misc_feature (2)..(9): Crosslink between residues
  MOD_RES (9)..(9): Alpha-Me S5-pentenyl-alanine olefin amino acid connected by an all-carbon crosslinker comprising one double bond
  MOD_RES (13)..(13): Cyclohexyl-Ala
  C-term NH2
FAHHWHQLAHRFA

SEQ ID NO: 854 - protein, 11 aa, Artificial Sequence
  Description of Artificial Sequence: Synthetic peptide
  N-term Ac
  MOD_RES (2)..(2): Alpha-Me R8-octenyl-alanine olefin amino acid connected by an all-carbon crosslinker comprising one double bond
  misc_feature (2)..(9): Crosslink between residues
  MOD_RES (9)..(9): Alpha-Me S5-pentenyl-alanine olefin amino acid connected by an all-carbon crosslinker comprising one double bond
  C-term NHAm
FAAYWEALAAA

SEQ ID NO: 855 - protein, 11 aa, Artificial Sequence
  Description of Artificial Sequence: Synthetic peptide
  N-term Ac
  MOD_RES (2)..(2): Alpha-Me R8-octenyl-alanine olefin amino acid connected by an all-carbon crosslinker comprising one double bond
  misc_feature (2)..(9): Crosslink between residues
  MOD_RES (9)..(9): Alpha-Me S5-pentenyl-alanine olefin amino acid connected by an all-carbon crosslinker comprising one double bond
  C-term NHiAm
FAAYWEALAAA

SEQ ID NO: 856 - protein, 11 aa, Artificial Sequence
  Description of Artificial Sequence: Synthetic peptide
  N-term Ac
  MOD_RES (2)..(2): Alpha-Me R8-octenyl-alanine olefin amino acid connected by an all-carbon crosslinker comprising one double bond
  misc_feature (2)..(9): Crosslink between residues
  MOD_RES (9)..(9): Alpha-Me S5-pentenyl-alanine olefin amino acid connected by an all-carbon crosslinker comprising one double bond
  C-term NHnPr3Ph
FAAYWEALAAA

SEQ ID NO: 857 - protein, 11 aa, Artificial Sequence
  Description of Artificial Sequence: Synthetic peptide
  N-term Ac
  MOD_RES (2)..(2): Alpha-Me R8-octenyl-alanine olefin amino acid connected by an all-carbon crosslinker comprising one double bond
  misc_feature (2)..(9): Crosslink between residues
  MOD_RES (9)..(9): Alpha-Me S5-pentenyl-alanine olefin amino acid connected by an all-carbon crosslinker comprising one double bond
  C-term NHnBu33Me
FAAYWEALAAA

SEQ ID NO: 858 - protein, 11 aa, Artificial Sequence
  Description of Artificial Sequence: Synthetic peptide
  N-term Ac
  MOD_RES (2)..(2): Alpha-Me R8-octenyl-alanine olefin amino acid connected by an all-carbon crosslinker comprising one double bond
  misc_feature (2)..(9): Crosslink between residues
  MOD_RES (9)..(9): Alpha-Me S5-pentenyl-alanine olefin amino acid connected by an all-carbon crosslinker comprising one double bond
  C-term NHnPr
FAAYWEALAAA

SEQ ID NO: 859 - protein, 11 aa, Artificial Sequence
  Description of Artificial Sequence: Synthetic peptide
  N-term Ac
  MOD_RES (2)..(2): Alpha-Me R8-octenyl-alanine olefin amino acid connected by an all-carbon crosslinker comprising one double bond
  misc_feature (2)..(9): Crosslink between residues
  MOD_RES (9)..(9): Alpha-Me S5-pentenyl-alanine olefin amino acid connected by an all-carbon crosslinker comprising one double bond
  C-term NHnEt2Ch
FAAYWEALAAA

SEQ ID NO: 860 - protein, 11 aa, Artificial Sequence
  Description of Artificial Sequence: Synthetic peptide
  N-term Ac
  MOD_RES (2)..(2): Alpha-Me R8-octenyl-alanine olefin amino acid connected by an all-carbon crosslinker comprising one double bond
  misc_feature (2)..(9): Crosslink between residues
  MOD_RES (9)..(9): Alpha-Me S5-pentenyl-alanine olefin amino acid connected by an all-carbon crosslinker comprising one double bond
  C-term NHnEt2Cp
FAAYWEALAAA

SEQ ID NO: 861 - protein, 11 aa, Artificial Sequence
  Description of Artificial Sequence: Synthetic peptide
  N-term Ac
  MOD_RES (2)..(2): Alpha-Me R8-octenyl-alanine olefin amino acid connected by an all-carbon crosslinker comprising one double bond
  misc_feature (2)..(9): Crosslink between residues
  MOD_RES (9)..(9): Alpha-Me S5-pentenyl-alanine olefin amino acid connected by an all-carbon crosslinker comprising one double bond
  C-term NHHex
FAAYWEALAAA

SEQ ID NO: 862 - protein, 15 aa, Artificial Sequence
  Description of Artificial Sequence: Synthetic peptide
  N-term Ac
  MOD_RES (4)..(4): Alpha-Me R8-octenyl-alanine olefin amino acid connected by an all-carbon crosslinker comprising one double bond
  misc_feature (4)..(11): Crosslink between residues
  MOD_RES (11)..(11): Alpha-Me S5-pentenyl-alanine olefin amino acid connected by an all-carbon crosslinker comprising one double bond
  C-term NH2
LTFAAYWAQLAAAIA

SEQ ID NO: 863 - protein, 15 aa, Artificial Sequence
  Description of Artificial Sequence: Synthetic peptide
  N-term Ac
  MOD_RES (4)..(4): Alpha-Me R8-octenyl-alanine olefin amino acid connected by an all-carbon crosslinker comprising one double bond
  misc_feature (4)..(11): Crosslink between residues
  MOD_RES (11)..(11): Alpha-Me S5-pentenyl-alanine olefin amino acid connected by an all-carbon crosslinker comprising one double bond
  C-term NH2
LTFAAYWAQLAAAIA

SEQ ID NO: 864 - protein, 15 aa, Artificial Sequence
  Description of Artificial Sequence: Synthetic peptide
  N-term Ac
  MOD_RES (4)..(4): Alpha-Me R8-octenyl-alanine olefin amino acid connected by an all-carbon crosslinker comprising one double bond
  misc_feature (4)..(11): Crosslink between residues
  MOD_RES (11)..(11): Alpha-Me S5-pentenyl-alanine olefin amino acid connected by an all-carbon crosslinker comprising one double bond
  C-term NH2
LTFAAYWAALAAAMA

SEQ ID NO: 865 - protein, 15 aa, Artificial Sequence
  Description of Artificial Sequence: Synthetic peptide
  N-term Ac
  MOD_RES (4)..(4): Alpha-Me R8-octenyl-alanine olefin amino acid connected by an all-carbon crosslinker comprising one double bond
  misc_feature (4)..(11): Crosslink between residues
  MOD_RES (11)..(11): Alpha-Me S5-pentenyl-alanine olefin amino acid connected by an all-carbon crosslinker comprising one double bond
  C-term NH2
LTFAAYWAALAAAMA

SEQ ID NO: 866 - protein, 15 aa, Artificial Sequence
  Description of Artificial Sequence: Synthetic peptide
  N-term Ac
  MOD_RES (4)..(4): Alpha-Me R8-octenyl-alanine olefin amino acid connected by an all-carbon crosslinker comprising one double bond
  misc_feature (4)..(11): Crosslink between residues
  MOD_RES (11)..(11): Alpha-Me S5-pentenyl-alanine olefin amino acid connected by an all-carbon crosslinker comprising one double bond
  MOD_RES (14)..(14): Norleucine
  C-term NH2
LTFAAYWAQLAAALA

SEQ ID NO: 867 - protein, 15 aa, Artificial Sequence
  Description of Artificial Sequence: Synthetic peptide
  N-term Ac
  MOD_RES (4)..(4): Alpha-Me R8-octenyl-alanine olefin amino acid connected by an all-carbon crosslinker comprising one double bond
  misc_feature (4)..(11): Crosslink between residues
  MOD_RES (11)..(11): Alpha-Me S5-pentenyl-alanine olefin amino acid connected by an all-carbon crosslinker comprising one double bond
  MOD_RES (14)..(14): Norleucine
  C-term NH2
LTFAAYWAQLAAALA

SEQ ID NO: 868 - protein, 15 aa, Artificial Sequence
  Description of Artificial Sequence: Synthetic peptide
  N-term Ac
  MOD_RES (4)..(4): Alpha-Me R8-octenyl-alanine olefin amino acid connected by an all-carbon crosslinker comprising one double bond
  misc_feature (4)..(11): Crosslink between residues
  MOD_RES (11)..(11): Alpha-Me S5-pentenyl-alanine olefin amino acid connected by an all-carbon crosslinker comprising one double bond
  MOD_RES (15)..(15): D-amino acid
  C-term NH2
LTFAAYWAQLAAAIA

SEQ ID NO: 869 - protein, 15 aa, Artificial Sequence
  Description of Artificial Sequence: Synthetic peptide
  N-term Ac
  MOD_RES (4)..(4): Alpha-Me R8-octenyl-alanine olefin amino acid connected by an all-carbon crosslinker comprising one double bond
  misc_feature (4)..(11): Crosslink between residues
  MOD_RES (11)..(11): Alpha-Me S5-pentenyl-alanine olefin amino acid connected by an all-carbon crosslinker comprising one double bond
  MOD_RES (15)..(15): D-amino acid
  C-term NH2
LTFAAYWAQLAAAIA

SEQ ID NO: 870 - protein, 15 aa, Artificial Sequence
  Description of Artificial Sequence: Synthetic peptide
  N-term Ac
  MOD_RES (4)..(4): Alpha-Me R8-octenyl-alanine olefin amino acid connected by an all-carbon crosslinker comprising one double bond
  misc_feature (4)..(11): Crosslink between residues
  MOD_RES (11)..(11): Alpha-Me S5-pentenyl-alanine olefin amino acid connected by an all-carbon crosslinker comprising one double bond
  MOD_RES (15)..(15): D-amino acid
  C-term NH2
LTFAAYWAALAAAMA

SEQ ID NO: 871 - protein, 15 aa, Artificial Sequence
  Description of Artificial Sequence: Synthetic peptide
  N-term Ac
  MOD_RES (4)..(4): Alpha-Me R8-octenyl-alanine olefin amino acid connected by an all-carbon crosslinker comprising one double bond
  misc_feature (4)..(11): Crosslink between residues
  MOD_RES (11)..(11): Alpha-Me S5-pentenyl-alanine olefin amino acid connected by an all-carbon crosslinker comprising one double bond
  MOD_RES (15)..(15): D-amino acid
  C-term NH2
LTFAAYWAALAAAMA

SEQ ID NO: 872 - protein, 15 aa, Artificial Sequence
  Description of Artificial Sequence: Synthetic peptide
  N-term Ac
  MOD_RES (4)..(4): Alpha-Me R8-octenyl-alanine olefin amino acid connected by an all-carbon crosslinker comprising one double bond
  misc_feature (4)..(11): Crosslink between residues
  MOD_RES (11)..(11): Alpha-Me S5-pentenyl-alanine olefin amino acid connected by an all-carbon crosslinker comprising one double bond
  MOD_RES (14)..(14): Norleucine
  MOD_RES (15)..(15): D-amino acid
  C-term NH2
LTFAAYWAQLAAALA

SEQ ID NO: 873 - protein, 15 aa, Artificial Sequence
  Description of Artificial Sequence: Synthetic peptide
  N-term Ac
  MOD_RES (4)..(4): Alpha-Me R8-octenyl-alanine olefin amino acid connected by an all-carbon crosslinker comprising one double bond
  misc_feature (4)..(11): Crosslink between residues
  MOD_RES (11)..(11): Alpha-Me S5-pentenyl-alanine olefin amino acid connected by an all-carbon crosslinker comprising one double bond
  MOD_RES (14)..(14): Norleucine
  MOD_RES (15)..(15): D-amino acid
  C-term NH2
LTFAAYWAQLAAALA

SEQ ID NO: 874 - protein, 15 aa, Artificial Sequence
  Description of Artificial Sequence: Synthetic peptide
  N-term Ac
  MOD_RES (4)..(4): Alpha-Me R8-octenyl-alanine olefin amino acid connected by an all-carbon crosslinker comprising one double bond
  misc_feature (4)..(11): Crosslink between residues
  MOD_RES (11)..(11): Alpha-Me S5-pentenyl-alanine olefin amino acid connected by an all-carbon crosslinker comprising one double bond
  MOD_RES (15)..(15): D-amino acid
  C-term NH2
LTFAAYWAALAAAIV

SEQ ID NO: 875 - protein, 15 aa, Artificial Sequence
  Description of Artificial Sequence: Synthetic peptide
  N-term Ac
  MOD_RES (4)..(4): Alpha-Me R8-octenyl-alanine olefin amino acid connected by an all-carbon crosslinker comprising one double bond
  misc_feature (4)..(11): Crosslink between residues
  MOD_RES (11)..(11): Alpha-Me S5-pentenyl-alanine olefin amino acid connected by an all-carbon crosslinker comprising one double bond
  MOD_RES (15)..(15): D-amino acid
  C-term NH2
LTFAAYWAALAAAIV

SEQ ID NO: 876 - protein, 15 aa, Artificial Sequence
  Description of Artificial Sequence: Synthetic peptide
  N-term Ac
  MOD_RES (4)..(4): Alpha-Me R8-octenyl-alanine olefin amino acid connected by an all-carbon crosslinker comprising one double bond
  misc_feature (4)..(11): Crosslink between residues
  MOD_RES (11)..(11): Alpha-Me S5-pentenyl-alanine olefin amino acid connected by an all-carbon crosslinker comprising one double bond
  MOD_RES (15)..(15): D-amino acid
  C-term NH2
LTFAAYWAQLAAAMV

SEQ ID NO: 877 - protein, 15 aa, Artificial Sequence
  Description of Artificial Sequence: Synthetic peptide
  N-term Ac
  MOD_RES (4)..(4): Alpha-Me R8-octenyl-alanine olefin amino acid connected by an all-carbon crosslinker comprising one double bond
  misc_feature (4)..(11): Crosslink between residues
  MOD_RES (11)..(11): Alpha-Me S5-pentenyl-alanine olefin amino acid connected by an all-carbon crosslinker comprising one double bond
  MOD_RES (14)..(14): Norleucine
  MOD_RES (15)..(15): D-amino acid
  C-term NH2
LTFAAYWAALAAALV

SEQ ID NO: 878 - protein, 15 aa, Artificial Sequence
  Description of Artificial Sequence: Synthetic peptide
  N-term Ac
  MOD_RES (4)..(4): Alpha-Me R8-octenyl-alanine olefin amino acid connected by an all-carbon crosslinker comprising one double bond
  misc_feature (4)..(11): Crosslink between residues
  MOD_RES (11)..(11): Alpha-Me S5-pentenyl-alanine olefin amino acid connected by an all-carbon crosslinker comprising one double bond
  MOD_RES (14)..(14): Norleucine
  MOD_RES (15)..(15): D-amino acid
  C-term NH2
LTFAAYWAALAAALV

SEQ ID NO: 879 - protein, 15 aa, Artificial Sequence
  Description of Artificial Sequence: Synthetic peptide
  N-term Ac
  MOD_RES (4)..(4): Alpha-Me R8-octenyl-alanine olefin amino acid connected by an all-carbon crosslinker comprising one double bond
  misc_feature (4)..(11): Crosslink between residues
  MOD_RES (11)..(11): Alpha-Me S5-pentenyl-alanine olefin amino acid connected by an all-carbon crosslinker comprising one double bond
  MOD_RES (15)..(15): D-amino acid
  C-term NH2
LTFAAYWAQLAAAIL

SEQ ID NO: 880 - protein, 15 aa, Artificial Sequence
  Description of Artificial Sequence: Synthetic peptide
  N-term Ac
  MOD_RES (4)..(4): Alpha-Me R8-octenyl-alanine olefin amino acid connected by an all-carbon crosslinker comprising one double bond
  misc_feature (4)..(11): Crosslink between residues
  MOD_RES (11)..(11): Alpha-Me S5-pentenyl-alanine olefin amino acid connected by an all-carbon crosslinker comprising one double bond
  MOD_RES (15)..(15): D-amino acid
  C-term NH2
LTFAAYWAQLAAAIL

SEQ ID NO: 881 - protein, 15 aa, Artificial Sequence
  Description of Artificial Sequence: Synthetic peptide
  N-term Ac
  MOD_RES (4)..(4): Alpha-Me R8-octenyl-alanine olefin amino acid connected by an all-carbon crosslinker comprising one double bond
  misc_feature (4)..(11): Crosslink between residues
  MOD_RES (11)..(11): Alpha-Me S5-pentenyl-alanine olefin amino acid connected by an all-carbon crosslinker comprising one double bond
  MOD_RES (15)..(15): D-amino acid
  C-term NH2
LTFAAYWAALAAAML

SEQ ID NO: 882 - protein, 15 aa, Artificial Sequence
  Description of Artificial Sequence: Synthetic peptide
  N-term Ac
  MOD_RES (4)..(4): Alpha-Me R8-octenyl-alanine olefin amino acid connected by an all-carbon crosslinker comprising one double bond
  misc_feature (4)..(11): Crosslink between residues
  MOD_RES (11)..(11): Alpha-Me S5-pentenyl-alanine olefin amino acid connected by an all-carbon crosslinker comprising one double bond
  MOD_RES (14)..(14): Norleucine
  MOD_RES (15)..(15): D-amino acid
  C-term NH2
LTFAAYWAQLAAALL

SEQ ID NO: 883 - protein, 15 aa, Artificial Sequence
  Description of Artificial Sequence: Synthetic peptide
  N-term Ac
  MOD_RES (4)..(4): Alpha-Me R8-octenyl-alanine olefin amino acid connected by an all-carbon crosslinker comprising one double bond
  misc_feature (4)..(11): Crosslink between residues
  MOD_RES (11)..(11): Alpha-Me S5-pentenyl-alanine olefin amino acid connected by an all-carbon crosslinker comprising one double bond
  MOD_RES (14)..(14): Norleucine
  MOD_RES (15)..(15): D-amino acid
  C-term NH2
LTFAAYWAQLAAALL

SEQ ID NO: 884 - protein, 13 aa, Artificial Sequence
  Description of Artificial Sequence: Synthetic peptide
  N-term Ac
  MOD_RES (2)..(2): Alpha-Me R8-octenyl-alanine olefin amino acid connected by an all-carbon crosslinker comprising one double bond
  misc_feature (2)..(9): Crosslink between residues
  MOD_RES (9)..(9): Alpha-Me S5-pentenyl-alanine olefin amino acid connected by an all-carbon crosslinker comprising one double bond
  C-term NH2
FAAYWEALAAAMA

SEQ ID NO: 885 - protein, 13 aa, Artificial Sequence
  Description of Artificial Sequence: Synthetic peptide
  N-term Ac
  MOD_RES (2)..(2): Alpha-Me R8-octenyl-alanine olefin amino acid connected by an all-carbon crosslinker comprising one double bond
  misc_feature (2)..(9): Crosslink between residues
  MOD_RES (9)..(9): Alpha-Me S5-pentenyl-alanine olefin amino acid connected by an all-carbon crosslinker comprising one double bond
  MOD_RES (12)..(12): Norleucine
  C-term NH2
FAAYWEALAAALA

SEQ ID NO: 886 - protein, 13 aa, Artificial Sequence
  Description of Artificial Sequence: Synthetic peptide
  N-term Ac
  MOD_RES (2)..(2): Alpha-Me R8-octenyl-alanine olefin amino acid connected by an all-carbon crosslinker comprising one double bond
  misc_feature (2)..(9): Crosslink between residues
  MOD_RES (9)..(9): Alpha-Me S5-pentenyl-alanine olefin amino acid connected by an all-carbon crosslinker comprising one double bond
  MOD_RES (13)..(13): D-amino acid
  C-term NH2
FAAYWEALAAAIA

SEQ ID NO: 887 - protein, 13 aa, Artificial Sequence
  Description of Artificial Sequence: Synthetic peptide
  N-term Ac
  MOD_RES (2)..(2): Alpha-Me R8-octenyl-alanine olefin amino acid connected by an all-carbon crosslinker comprising one double bond
  misc_feature (2)..(9): Crosslink between residues
  MOD_RES (9)..(9): Alpha-Me S5-pentenyl-alanine olefin amino acid connected by an all-carbon crosslinker comprising one double bond
  MOD_RES (13)..(13): D-amino acid
  C-term NH2
FAAYWEALAAAMA

SEQ ID NO: 888 - protein, 13 aa, Artificial Sequence
  Description of Artificial Sequence: Synthetic peptide
  N-term Ac
  MOD_RES (2)..(2): Alpha-Me R8-octenyl-alanine olefin amino acid connected by an all-carbon crosslinker comprising one double bond
  misc_feature (2)..(9): Crosslink between residues
  MOD_RES (9)..(9): Alpha-Me S5-pentenyl-alanine olefin amino acid connected by an all-carbon crosslinker comprising one double bond
  MOD_RES (12)..(12): Norleucine
  MOD_RES (13)..(13): D-amino acid
  C-term NH2
FAAYWEALAAALA

SEQ ID NO: 889 - protein, 13 aa, Artificial Sequence
  Description of Artificial Sequence: Synthetic peptide
  N-term Ac
  MOD_RES (2)..(2): Alpha-Me R8-octenyl-alanine olefin amino acid connected by an all-carbon crosslinker comprising one double bond
  misc_feature (2)..(9): Crosslink between residues
  MOD_RES (9)..(9): Alpha-Me S5-pentenyl-alanine olefin amino acid connected by an all-carbon crosslinker comprising one double bond
  MOD_RES (13)..(13): D-amino acid
  C-term NH2
FAAYWEALAAAIV

SEQ ID NO: 890 - protein, 13 aa, Artificial Sequence
  Description of Artificial Sequence: Synthetic peptide
  N-term Ac
  MOD_RES (2)..(2): Alpha-Me R8-octenyl-alanine olefin amino acid connected by an all-carbon crosslinker comprising one double bond
  misc_feature (2)..(9): Crosslink between residues
  MOD_RES (9)..(9): Alpha-Me S5-pentenyl-alanine olefin amino acid connected by an all-carbon crosslinker comprising one double bond
  MOD_RES (13)..(13): D-amino acid
  C-term NH2
FAAYWEALAAAMV

SEQ ID NO: 891 - protein, 13 aa, Artificial Sequence
  Description of Artificial Sequence: Synthetic peptide
  N-term Ac
  MOD_RES (2)..(2): Alpha-Me R8-octenyl-alanine olefin amino acid connected by an all-carbon crosslinker comprising one double bond
  misc_feature (2)..(9): Crosslink between residues
  MOD_RES (9)..(9): Alpha-Me S5-pentenyl-alanine olefin amino acid connected by an all-carbon crosslinker comprising one double bond
  MOD_RES (12)..(12): Norleucine
  MOD_RES (13)..(13): D-amino acid
  C-term NH2
FAAYWEALAAALV

SEQ ID NO: 892 - protein, 13 aa, Artificial Sequence
  Description of Artificial Sequence: Synthetic peptide
  N-term Ac
  MOD_RES (2)..(2): Alpha-Me R8-octenyl-alanine olefin amino acid connected by an all-carbon crosslinker comprising one double bond
  misc_feature (2)..(9): Crosslink between residues
  MOD_RES (9)..(9): Alpha-Me S5-pentenyl-alanine olefin amino acid connected by an all-carbon crosslinker comprising one double bond
  MOD_RES (13)..(13): D-amino acid
  C-term NH2
FAAYWEALAAAIL

SEQ ID NO: 893 - protein, 13 aa, Artificial Sequence
  Description of Artificial Sequence: Synthetic peptide
  N-term Ac
  MOD_RES (2)..(2): Alpha-Me R8-octenyl-alanine olefin amino acid connected by an all-carbon crosslinker comprising one double bond
  misc_feature (2)..(9): Crosslink between residues
  MOD_RES (9)..(9): Alpha-Me S5-pentenyl-alanine olefin amino acid connected by an all-carbon crosslinker comprising one double bond
  MOD_RES (13)..(13): D-amino acid
  C-term NH2
FAAYWEALAAAML

SEQ ID NO: 894 - protein, 13 aa, Artificial Sequence
  Description of Artificial Sequence: Synthetic peptide
  N-term Ac
  MOD_RES (2)..(2): Alpha-Me R8-octenyl-alanine olefin amino acid connected by an all-carbon crosslinker comprising one double bond
  misc_feature (2)..(9): Crosslink between residues
  MOD_RES (9)..(9): Alpha-Me S5-pentenyl-alanine olefin amino acid connected by an all-carbon crosslinker comprising one double bond
  MOD_RES (12)..(12): Norleucine
  MOD_RES (13)..(13): D-amino acid
  C-term NH2
FAAYWEALAAALL

SEQ ID NO: 895 - protein, 13 aa, Artificial Sequence
  Description of Artificial Sequence: Synthetic peptide
  N-term Ac
  MOD_RES (2)..(2): Alpha-Me R8-octenyl-alanine olefin amino acid connected by an all-carbon crosslinker comprising one double bond
  misc_feature (2)..(9): Crosslink between residues
  MOD_RES (9)..(9): Alpha-Me S5-pentenyl-alanine olefin amino acid connected by an all-carbon crosslinker comprising one double bond
  MOD_RES (12)..(12): Norleucine
  MOD_RES (13)..(13): D-amino acid
  C-term NH2
FAAYWEALAAALL

SEQ ID NO: 896 - protein, 14 aa, Artificial Sequence
  Description of Artificial Sequence: Synthetic peptide
  N-term Ac
  MOD_RES (4)..(4): Alpha-Me R8-octenyl-alanine olefin amino acid connected by an all-carbon crosslinker comprising one double bond
  misc_feature (4)..(11): Crosslink between residues
  MOD_RES (7)..(7): 6cl-Trp
  MOD_RES (11)..(11): Alpha-Me S5-pentenyl-alanine olefin amino acid connected by an all-carbon crosslinker comprising one double bond
  C-term NH2
LTFAAYWAQLASAA

SEQ ID NO: 897 - protein, 14 aa, Artificial Sequence
  Description of Artificial Sequence: Synthetic peptide
  N-term Ac
  MOD_RES (4)..(4): Alpha-Me R8-octenyl-alanine olefin amino acid connected by an all-carbon crosslinker comprising one double bond
  misc_feature (4)..(11): Crosslink between residues
  MOD_RES (7)..(7): 6cl-Trp
  MOD_RES (11)..(11): Alpha-Me S5-pentenyl-alanine olefin amino acid connected by an all-carbon crosslinker comprising one double bond
  C-term NH2
LTFAAYWAQLASAA

SEQ ID NO: 898 - protein, 15 aa, Artificial Sequence
  Description of Artificial Sequence: Synthetic peptide
  N-term Ac
  MOD_RES (4)..(4): Alpha-Me R8-octenyl-alanine olefin amino acid connected by an all-carbon crosslinker comprising one double bond
  misc_feature (4)..(11): Crosslink between residues
  MOD_RES (11)..(11): Alpha-Me S5-pentenyl-alanine olefin amino acid connected by an all-carbon crosslinker comprising one double bond
  MOD_RES (15)..(15): D-amino acid
  C-term NH2
WTFAFYWSQLAAVAA

SEQ ID NO: 899 - protein, 15 aa, Artificial Sequence
  Description of Artificial Sequence: Synthetic peptide
  N-term Ac
  MOD_RES (4)..(4): Alpha-Me R8-octenyl-alanine olefin amino acid connected by an all-carbon crosslinker comprising one double bond
  misc_feature (4)..(11): Crosslink between residues
  MOD_RES (11)..(11): Alpha-Me S5-pentenyl-alanine olefin amino acid connected by an all-carbon crosslinker comprising one double bond
  MOD_RES (15)..(15): D-amino acid
  C-term NH2
WTFAFYWSQLAAVAA

SEQ ID NO: 900 - protein, 14 aa, Artificial Sequence
  Description of Artificial Sequence: Synthetic peptide
  N-term Ac
  MOD_RES (4)..(4): Alpha-Me R8-octenyl-alanine olefin amino acid connected by an all-carbon crosslinker comprising one double bond
  misc_feature (4)..(11): Crosslink between residues
  MOD_RES (11)..(11): Alpha-Me S5-pentenyl-alanine olefin amino acid connected by an all-carbon crosslinker comprising one double bond
  C-term NH2
WTFAVYWSQLAAVA

SEQ ID NO: 901 - protein, 14 aa, Artificial Sequence
  Description of Artificial Sequence: Synthetic peptide
  N-term Ac
  MOD_RES (4)..(4): Alpha-Me R8-octenyl-alanine olefin amino acid connected by an all-carbon crosslinker comprising one double bond
  misc_feature (4)..(11): Crosslink between residues
  MOD_RES (11)..(11): Alpha-Me S5-pentenyl-alanine olefin amino acid connected by an all-carbon crosslinker comprising one double bond
  C-term NH2
WTFAVYWSQLAAVA

SEQ ID NO: 902 - protein, 15 aa, Artificial Sequence
  Description of Artificial Sequence: Synthetic peptide
  N-term Ac
  MOD_RES (4)..(4): Alpha-Me R8-octenyl-alanine olefin amino acid connected by an all-carbon crosslinker comprising one double bond
  misc_feature (4)..(11): Crosslink between residues
  MOD_RES (11)..(11): Alpha-Me S5-pentenyl-alanine olefin amino acid connected by an all-carbon crosslinker comprising one double bond
  MOD_RES (15)..(15): D-amino acid
  C-term NH2
WTFAFYWSQLASAAA

SEQ ID NO: 903 - protein, 15 aa, Artificial Sequence
  Description of Artificial Sequence: Synthetic peptide
  N-term Ac
  MOD_RES (4)..(4): Alpha-Me R8-octenyl-alanine olefin amino acid connected by an all-carbon crosslinker comprising one double bond
  misc_feature (4)..(11): Crosslink between residues
  MOD_RES (11)..(11): Alpha-Me S5-pentenyl-alanine olefin amino acid connected by an all-carbon crosslinker comprising one double bond
  MOD_RES (15)..(15): D-amino acid
  C-term NH2
WTFAFYWSQLASAAA

SEQ ID NO: 904 - protein, 16 aa, Artificial Sequence
  Description of Artificial Sequence: Synthetic peptide
  N-term Ac
  MOD_RES (4)..(4): Alpha-Me R8-octenyl-alanine olefin amino acid connected by an all-carbon crosslinker comprising one double bond
  misc_feature (4)..(11): Crosslink between residues
  MOD_RES (11)..(11): Alpha-Me S5-pentenyl-alanine olefin amino acid connected by an all-carbon crosslinker comprising one double bond
  MOD_RES (15)..(16): D-amino acid
  C-term NH2
WTFAVYWSQLAAVAAA

SEQ ID NO: 905 - protein, 16 aa, Artificial Sequence
  Description of Artificial Sequence: Synthetic peptide
  N-term Ac
  MOD_RES (4)..(4): Alpha-Me R8-octenyl-alanine olefin amino acid connected by an all-carbon crosslinker comprising one double bond
  misc_feature (4)..(11): Crosslink between residues
  MOD_RES (11)..(11): Alpha-Me S5-pentenyl-alanine olefin amino acid connected by an all-carbon crosslinker comprising one double bond
  MOD_RES (15)..(16): D-amino acid
  C-term NH2
WTFAVYWSQLAAVAAA

SEQ ID NO: 906 - protein, 14 aa, Artificial Sequence
  Description of Artificial Sequence: Synthetic peptide
  N-term Ac
  MOD_RES (4)..(4): Alpha-Me R8-octenyl-alanine olefin amino acid connected by an all-carbon crosslinker comprising one double bond
  misc_feature (4)..(11): Crosslink between residues
  MOD_RES (11)..(11): Alpha-Me S5-pentenyl-alanine olefin amino acid connected by an all-carbon crosslinker comprising one double bond
  C-term NH2
LTFAAYWAQLAAVG

SEQ ID NO: 907 - protein, 14 aa, Artificial Sequence
  Description of Artificial Sequence: Synthetic peptide
  N-term Ac
  MOD_RES (4)..(4): Alpha-Me R8-octenyl-alanine olefin amino acid connected by an all-carbon crosslinker comprising one double bond
  misc_feature (4)..(11): Crosslink between residues
  MOD_RES (11)..(11): Alpha-Me S5-pentenyl-alanine olefin amino acid connected by an all-carbon crosslinker comprising one double bond
  C-term NH2
LTFAAYWAQLAAVG

SEQ ID NO: 908 - protein, 14 aa, Artificial Sequence
  Description of Artificial Sequence: Synthetic peptide
  N-term Ac
  MOD_RES (4)..(4): Alpha-Me R8-octenyl-alanine olefin amino acid connected by an all-carbon crosslinker comprising one double bond
  misc_feature (4)..(11): Crosslink between residues
  MOD_RES (11)..(11): Alpha-Me S5-pentenyl-alanine olefin amino acid connected by an all-carbon crosslinker comprising one double bond
  C-term NH2
LTFAAYWAQLAAVQ

SEQ ID NO: 909 - protein, 14 aa, Artificial Sequence
  Description of Artificial Sequence: Synthetic peptide
  N-term Ac
  MOD_RES (4)..(4): Alpha-Me R8-octenyl-alanine olefin amino acid connected by an all-carbon crosslinker comprising one double bond
  misc_feature (4)..(11): Crosslink between residues
  MOD_RES (11)..(11): Alpha-Me S5-pentenyl-alanine olefin amino acid connected by an all-carbon crosslinker comprising one double bond
  C-term NH2
LTFAAYWAQLAAVQ

SEQ ID NO: 910 - protein, 14 aa, Artificial Sequence
  Description of Artificial Sequence: Synthetic peptide
  N-term Ac
  MOD_RES (4)..(4): Alpha-Me R8-octenyl-alanine olefin amino acid connected by an all-carbon crosslinker comprising one double bond
  misc_feature (4)..(11): Crosslink between residues
  MOD_RES (11)..(11): Alpha-Me S5-pentenyl-alanine olefin amino acid connected by an all-carbon crosslinker comprising one double bond
  MOD_RES (14)..(14): D-amino acid
  C-term NH2
LTFAAYWAQLASAA

SEQ ID NO: 911 - protein, 14 aa, Artificial Sequence
  Description of Artificial Sequence: Synthetic peptide
  N-term Ac
  MOD_RES (4)..(4): Alpha-Me R8-octenyl-alanine olefin amino acid connected by an all-carbon crosslinker comprising one double bond
  misc_feature (4)..(11): Crosslink between residues
  MOD_RES (11)..(11): Alpha-Me S5-pentenyl-alanine olefin amino acid connected by an all-carbon crosslinker comprising one double bond
  MOD_RES (14)..(14): D-amino acid
  C-term NH2
LTFAAYWAQLASAA

SEQ ID NO: 912 - protein, 14 aa, Artificial Sequence
  Description of Artificial Sequence: Synthetic peptide
  N-term Ac
  MOD_RES (4)..(4): Alpha-Me R8-octenyl-alanine olefin amino acid connected by an all-carbon crosslinker comprising one double bond
  misc_feature (4)..(11): Crosslink between residues
  MOD_RES (10)..(10): hLeu
  MOD_RES (11)..(11): Alpha-Me S5-pentenyl-alanine olefin amino acid connected by an all-carbon crosslinker comprising one double bond
  C-term NH2
LTFAAYWAQLASAA

SEQ ID NO: 913 - protein, 14 aa, Artificial Sequence
  Description of Artificial Sequence: Synthetic peptide
  N-term Ac
  MOD_RES (4)..(4): Alpha-Me R8-octenyl-alanine olefin amino acid connected by an all-carbon crosslinker comprising one double bond
  misc_feature (4)..(11): Crosslink between residues
  MOD_RES (10)..(10): hLeu
  MOD_RES (11)..(11): Alpha-Me S5-pentenyl-alanine olefin amino acid connected by an all-carbon crosslinker comprising one double bond
  C-term NH2
LTFAAYWAQLASAA

SEQ ID NO: 914 - protein, 14 aa, Artificial Sequence
  Description of Artificial Sequence: Synthetic peptide
  N-term Ac
  MOD_RES (4)..(4): Alpha-Me R8-octenyl-alanine olefin amino acid connected by an all-carbon crosslinker comprising one double bond
  misc_feature (4)..(14): Crosslink between residues
  MOD_RES (11)..(11): Two pentenyl-alanine olefin side chains, each of which is crosslinked to another amino acid as indicated
  MOD_RES (14)..(14): Alpha-Me S5-pentenyl-alanine olefin amino acid connected by an all-carbon crosslinker comprising one double bond
  C-term NH2
LTFAAYWEQLASAA

SEQ ID NO: 915 - protein, 14 aa, Artificial Sequence
  Description of Artificial Sequence: Synthetic peptide
  N-term Ac
  MOD_RES (4)..(4): Alpha-Me R8-octenyl-alanine olefin amino acid connected by an all-carbon crosslinker comprising one double bond
  misc_feature (4)..(11): Crosslink between residues
  MOD_RES (11)..(11): Alpha-Me S5-pentenyl-alanine olefin amino acid connected by an all-carbon crosslinker comprising one double bond
  C-term NH2
LTFAAYWAQLASLA

SEQ ID NO: 916 - protein, 14 aa, Artificial Sequence
  Description of Artificial Sequence: Synthetic peptide
  N-term Ac
  MOD_RES (4)..(4): Alpha-Me R8-octenyl-alanine olefin amino acid connected by an all-carbon crosslinker comprising one double bond
  misc_feature (4)..(11): Crosslink between residues
  MOD_RES (11)..(11): Alpha-Me S5-pentenyl-alanine olefin amino acid connected by an all-carbon crosslinker comprising one double bond
  C-term NH2
LTFAAYWAQLASLA

SEQ ID NO: 917 - protein, 14 aa, Artificial Sequence
  Description of Artificial Sequence: Synthetic peptide
  N-term Ac
  MOD_RES (4)..(4): Alpha-Me R8-octenyl-alanine olefin amino acid connected by an all-carbon crosslinker comprising one double bond
  misc_feature (4)..(11): Crosslink between residues
  MOD_RES (11)..(11): Alpha-Me S5-pentenyl-alanine olefin amino acid connected by an all-carbon crosslinker comprising one double bond
  C-term NH2
LTFAAYWAQLASWA

SEQ ID NO: 918 - protein, 14 aa, Artificial Sequence
  Description of Artificial Sequence: Synthetic peptide
  N-term Ac
  MOD_RES (4)..(4): Alpha-Me R8-octenyl-alanine olefin amino acid connected by an all-carbon crosslinker comprising one double bond
  misc_feature (4)..(11): Crosslink between residues
  MOD_RES (11)..(11): Alpha-Me S5-pentenyl-alanine olefin amino acid connected by an all-carbon crosslinker comprising one double bond
  C-term NH2
LTFAAYWAQLASWA

SEQ ID NO: 919 - protein, 14 aa, Artificial Sequence
  Description of Artificial Sequence: Synthetic peptide
  N-term Ac
  MOD_RES (4)..(4): Alpha-Me R8-octenyl-alanine olefin amino acid connected by an all-carbon crosslinker comprising one double bond
  misc_feature (4)..(11): Crosslink between residues
  MOD_RES (11)..(11): Alpha-Me S5-pentenyl-alanine olefin amino acid connected by an all-carbon crosslinker comprising one double bond
  C-term NH2
LTFAAYWAQLASVS

SEQ ID NO: 920 - protein, 14 aa, Artificial Sequence
  Description of Artificial Sequence: Synthetic peptide
  N-term Ac
  MOD_RES (4)..(4): Alpha-Me R8-octenyl-alanine olefin amino acid connected by an all-carbon crosslinker comprising one double bond
  misc_feature (4)..(11): Crosslink between residues
  MOD_RES (11)..(11): Alpha-Me S5-pentenyl-alanine olefin amino acid connected by an all-carbon crosslinker comprising one double bond
  C-term NH2
LTFAAYWAQLASAS

SEQ ID NO: 921 - protein, 14 aa, Artificial Sequence
  Description of Artificial Sequence: Synthetic peptide
  N-term Ac
  MOD_RES (4)..(4): Alpha-Me R8-octenyl-alanine olefin amino acid connected by an all-carbon crosslinker comprising one double bond
  misc_feature (4)..(11): Crosslink between residues
  MOD_RES (11)..(11): Alpha-Me S5-pentenyl-alanine olefin amino acid connected by an all-carbon crosslinker comprising one double bond
  C-term NH2
LTFAAYWAQLASVG

SEQ ID NO: 922 - protein, 14 aa, Artificial Sequence
  Description of Artificial Sequence: Synthetic peptide
  N-term Ac
  MOD_RES (4)..(4): Alpha-Me R8-octenyl-alanine olefin amino acid connected by an all-carbon crosslinker comprising one double bond
  misc_feature (4)..(11): Crosslink between residues
  MOD_RES (11)..(11): Alpha-Me S5-pentenyl-alanine olefin amino acid connected by an all-carbon crosslinker comprising one double bond
  MOD_RES (14)..(14): D-amino acid
  C-term NH2
ETFAVYWAQLASAA

SEQ ID NO: 923 - protein, 14 aa, Artificial Sequence
  Description of Artificial Sequence: Synthetic peptide
  N-term Ac
  MOD_RES (4)..(4): Alpha-Me R8-octenyl-alanine olefin amino acid connected by an all-carbon crosslinker comprising one double bond
  misc_feature (4)..(11): Crosslink between residues
  MOD_RES (11)..(11): Alpha-Me S5-pentenyl-alanine olefin amino acid connected by an all-carbon crosslinker comprising one double bond
  C-term NH2
ETFAVYWAQLASAA

SEQ ID NO: 924 - protein, 14 aa, Artificial Sequence
  Description of Artificial Sequence: Synthetic peptide
  N-term Ac
  MOD_RES (4)..(4): Alpha-Me R8-octenyl-alanine olefin amino acid connected by an all-carbon crosslinker comprising one double bond
  misc_feature (4)..(11): Crosslink between residues
  MOD_RES (11)..(11): Alpha-Me S5-pentenyl-alanine olefin amino acid connected by an all-carbon crosslinker comprising one double bond
  C-term NH2
ETFAVYWAQLASVA

SEQ ID NO: 925 - protein, 14 aa, Artificial Sequence
  Description of Artificial Sequence: Synthetic peptide
  N-term Ac
  MOD_RES (4)..(4): Alpha-Me R8-octenyl-alanine olefin amino acid connected by an all-carbon crosslinker comprising one double bond
  misc_feature (4)..(11): Crosslink between residues
  MOD_RES (11)..(11): Alpha-Me S5-pentenyl-alanine olefin amino acid connected by an all-carbon crosslinker comprising one double bond
  C-term NH2
ETFAVYWAQLASLA

SEQ ID NO: 926 - protein, 14 aa, Artificial Sequence
  Description of Artificial Sequence: Synthetic peptide
  N-term Ac
  MOD_RES (4)..(4): Alpha-Me R8-octenyl-alanine olefin amino acid connected by an all-carbon crosslinker comprising one double bond
  misc_feature (4)..(11): Crosslink between residues
  MOD_RES (11)..(11): Alpha-Me S5-pentenyl-alanine olefin amino acid connected by an all-carbon crosslinker comprising one double bond
  C-term NH2
ETFAVYWAQLASWA

SEQ ID NO: 927 - protein, 14 aa, Artificial Sequence
  Description of Artificial Sequence: Synthetic peptide
  N-term Ac
  MOD_RES (4)..(4): Alpha-Me R8-octenyl-alanine olefin amino acid connected by an all-carbon crosslinker comprising one double bond
  misc_feature (4)..(11): Crosslink between residues
  MOD_RES (11)..(11): Alpha-Me S5-pentenyl-alanine olefin amino acid connected by an all-carbon crosslinker comprising one double bond
  C-term NH2
ETFAKYWAQLASWA

SEQ ID NO: 928 - protein, 14 aa, Artificial Sequence
  Description of Artificial Sequence: Synthetic peptide
  N-term Ac
  MOD_RES (4)..(4): Alpha-Me R8-octenyl-alanine olefin amino acid connected by an all-carbon crosslinker comprising one double bond
  misc_feature (4)..(11): Crosslink between residues
  MOD_RES (11)..(11): Alpha-Me S5-pentenyl-alanine olefin amino acid connected by an all-carbon crosslinker comprising one double bond
  C-term NH2
ETFAVYWAQLASVS

SEQ ID NO: 929 - protein, 14 aa, Artificial Sequence
  Description of Artificial Sequence: Synthetic peptide
  N-term Ac
  MOD_RES (4)..(4): Alpha-Me R8-octenyl-alanine olefin amino acid connected by an all-carbon crosslinker comprising one double bond
  misc_feature (4)..(11): Crosslink between residues
  MOD_RES (11)..(11): Alpha-Me S5-pentenyl-alanine olefin amino acid connected by an all-carbon crosslinker comprising one double bond
  C-term NH2
ETFAVYWAQLASAS

SEQ ID NO: 930 - protein, 14 aa, Artificial Sequence
  Description of Artificial Sequence: Synthetic peptide
  N-term Ac
  MOD_RES (4)..(4): Alpha-Me R8-octenyl-alanine olefin amino acid connected by an all-carbon crosslinker comprising one double bond
  misc_feature (4)..(11): Crosslink between residues
  MOD_RES (11)..(11): Alpha-Me S5-pentenyl-alanine olefin amino acid connected by an all-carbon crosslinker comprising one double bond
  C-term NH2
ETFAVYWAQLASVG

SEQ ID NO: 931 - protein, 14 aa, Artificial Sequence
  Description of Artificial Sequence: Synthetic peptide
  N-term Ac
  MOD_RES (4)..(4): Alpha-Me R8-octenyl-alanine olefin amino acid connected by an all-carbon crosslinker comprising one double bond
  misc_feature (4)..(11): Crosslink between residues
  MOD_RES (11)..(11): Alpha-Me S5-pentenyl-alanine olefin amino acid connected by an all-carbon crosslinker comprising one double bond
  MOD_RES (14)..(14): D-amino acid
  C-term NH2
LTFAVYWAQLASSA

SEQ ID NO: 932 - protein, 14 aa, Artificial Sequence
  Description of Artificial Sequence: Synthetic peptide
  N-term Ac
  MOD_RES (4)..(4): Alpha-Me R8-octenyl-alanine olefin amino acid connected by an all-carbon crosslinker comprising one double bond
  misc_feature (4)..(11): Crosslink between residues
  MOD_RES (11)..(11): Alpha-Me S5-pentenyl-alanine olefin amino acid connected by an all-carbon crosslinker comprising one double bond
  MOD_RES (14)..(14): D-amino acid
  C-term NH2
ETFAVYWAQLASSA

SEQ ID NO: 933 - protein, 14 aa, Artificial Sequence
  Description of Artificial Sequence: Synthetic peptide
  N-term Ac
  MOD_RES (4)..(4): Alpha-Me R8-octenyl-alanine olefin amino acid connected by an all-carbon crosslinker comprising one double bond
  misc_feature (4)..(11): Crosslink between residues
  MOD_RES (11)..(11): Alpha-Me S5-pentenyl-alanine olefin amino acid connected by an all-carbon crosslinker comprising one double bond
  MOD_RES (14)..(14): D-amino acid
  C-term NH2
LTFAVYWAQLASNA

SEQ ID NO: 934 - protein, 14 aa, Artificial Sequence
  Description of Artificial Sequence: Synthetic peptide
  N-term Ac
  MOD_RES (4)..(4): Alpha-Me R8-octenyl-alanine olefin amino acid connected by an all-carbon crosslinker comprising one double bond
  misc_feature (4)..(11): Crosslink between residues
  MOD_RES (11)..(11): Alpha-Me S5-pentenyl-alanine olefin amino acid connected by an all-carbon crosslinker comprising one double bond
  MOD_RES (14)..(14): D-amino acid
  C-term NH2
ETFAVYWAQLASNA

SEQ ID NO: 935 - protein, 14 aa, Artificial Sequence
  Description of Artificial Sequence: Synthetic peptide
  N-term Ac
  MOD_RES (4)..(4): Alpha-Me R8-octenyl-alanine olefin amino acid connected by an all-carbon crosslinker comprising one double bond
  misc_feature (4)..(11): Crosslink between residues
  MOD_RES (11)..(11): Alpha-Me S5-pentenyl-alanine olefin amino acid connected by an all-carbon crosslinker comprising one double bond
  MOD_RES (14)..(14): D-amino acid
  C-term NH2
LTFAVYWAQLASAA

SEQ ID NO: 936 - protein, 14 aa, Artificial Sequence
  Description of Artificial Sequence: Synthetic peptide
  N-term Ac
  MOD_RES (4)..(4): Alpha-Me R8-octenyl-alanine olefin amino acid connected by an all-carbon crosslinker comprising one double bond
  misc_feature (4)..(11): Crosslink between residues
  MOD_RES (11)..(11): Alpha-Me S5-pentenyl-alanine olefin amino acid connected by an all-carbon crosslinker comprising one double bond
  C-term NH2
LTFAVYWAQLASVA

SEQ ID NO: 937 - protein, 14 aa, Artificial Sequence
  Description of Artificial Sequence: Synthetic peptide
  N-term Ac
  MOD_RES (4)..(4): Alpha-Me R8-octenyl-alanine olefin amino acid connected by an all-carbon crosslinker comprising one double bond
  misc_feature (4)..(11): Crosslink between residues
  MOD_RES (11)..(11): Alpha-Me S5-pentenyl-alanine olefin amino acid connected by an all-carbon crosslinker comprising one double bond
  C-term NH2
LTFAVYWAQLASVA

SEQ ID NO: 938 - protein, 14 aa, Artificial Sequence
  Description of Artificial Sequence: Synthetic peptide
  N-term Ac
  MOD_RES (4)..(4): Alpha-Me R8-octenyl-alanine olefin amino acid connected by an all-carbon crosslinker comprising one double bond
  misc_feature (4)..(11): Crosslink between residues
  MOD_RES (11)..(11): Alpha-Me S5-pentenyl-alanine olefin amino acid connected by an all-carbon crosslinker comprising one double bond
  C-term NH2
LTFAVYWAQLASWA

SEQ ID NO: 939 - protein, 14 aa, Artificial Sequence
  Description of Artificial Sequence: Synthetic peptide
  N-term Ac
  MOD_RES (4)..(4): Alpha-Me R8-octenyl-alanine olefin amino acid connected by an all-carbon crosslinker comprising one double bond
  misc_feature (4)..(11): Crosslink between residues
  MOD_RES (11)..(11): Alpha-Me S5-pentenyl-alanine olefin amino acid connected by an all-carbon crosslinker comprising one double bond
  C-term NH2
LTFAVYWAQLASVS

SEQ ID NO: 940 - protein, 14 aa, Artificial Sequence
  Description of Artificial Sequence: Synthetic peptide
  N-term Ac
  MOD_RES (4)..(4): Alpha-Me R8-octenyl-alanine olefin amino acid connected by an all-carbon crosslinker comprising one double bond
  misc_feature (4)..(11): Crosslink between residues
  MOD_RES (11)..(11): Alpha-Me S5-pentenyl-alanine olefin amino acid connected by an all-carbon crosslinker comprising one double bond
  C-term NH2
LTFAVYWAQLASVS

SEQ ID NO: 941 - protein, 14 aa, Artificial Sequence
  Description of Artificial Sequence: Synthetic peptide
  N-term Ac
  MOD_RES (4)..(4): Alpha-Me R8-octenyl-alanine olefin amino acid connected by an all-carbon crosslinker comprising one double bond
  misc_feature (4)..(11): Crosslink between residues
  MOD_RES (11)..(11): Alpha-Me S5-pentenyl-alanine olefin amino acid connected by an all-carbon crosslinker comprising one double bond
  C-term NH2
LTFAVYWAQLASAS

SEQ ID NO: 942 - protein, 14 aa, Artificial Sequence
  Description of Artificial Sequence: Synthetic peptide
  N-term Ac
  MOD_RES (4)..(4): Alpha-Me R8-octenyl-alanine olefin amino acid connected by an all-carbon crosslinker comprising one double bond
  misc_feature (4)..(11): Crosslink between residues
  MOD_RES (11)..(11): Alpha-Me S5-pentenyl-alanine olefin amino acid connected by an all-carbon crosslinker comprising one double bond
  C-term NH2
LTFAVYWAQLASAS

SEQ ID NO: 943 - protein, 14 aa, Artificial Sequence
  Description of Artificial Sequence: Synthetic peptide
  N-term Ac
  MOD_RES (4)..(4): Alpha-Me R8-octenyl-alanine olefin amino acid connected by an all-carbon crosslinker comprising one double bond
  misc_feature (4)..(11): Crosslink between residues
  MOD_RES (11)..(11): Alpha-Me S5-pentenyl-alanine olefin amino acid connected by an all-carbon crosslinker comprising one double bond
  C-term NH2
LTFAVYWAQLASVG

SEQ ID NO: 944 - protein, 14 aa, Artificial Sequence
  Description of Artificial Sequence: Synthetic peptide
  N-term Ac
  MOD_RES (4)..(4): Alpha-Me R8-octenyl-alanine olefin amino acid connected by an all-carbon crosslinker comprising one double bond
  misc_feature (4)..(11): Crosslink between residues
  MOD_RES (11)..(11): Alpha-Me S5-pentenyl-alanine olefin amino acid connected by an all-carbon crosslinker comprising one double bond
  C-term NH2
LTFAVYWAQLASVG

SEQ ID NO: 945 - protein, 14 aa, Artificial Sequence
  Description of Artificial Sequence: Synthetic peptide
  N-term Ac
  MOD_RES (4)..(4): Alpha-Me R8-octenyl-alanine olefin amino acid connected by an all-carbon crosslinker comprising one double bond
  misc_feature (4)..(11): Crosslink between residues
  MOD_RES (10)..(10): Cyclohexyl-Ala
  MOD_RES (11)..(11): Alpha-Me S5-pentenyl-alanine olefin amino acid connected by an all-carbon crosslinker comprising one double bond
  C-term NH2
LTFAEYWAQAASAA

SEQ ID NO: 946 - protein, 14 aa, Artificial Sequence
  Description of Artificial Sequence: Synthetic peptide
  N-term Ac
  MOD_RES (4)..(4): Alpha-Me R8-octenyl-alanine olefin amino acid connected by an all-carbon crosslinker comprising one double bond
  misc_feature (4)..(11): Crosslink between residues
  MOD_RES (10)..(10): Cyclohexyl-Ala
  MOD_RES (11)..(11): Alpha-Me S5-pentenyl-alanine olefin amino acid connected by an all-carbon crosslinker comprising one double bond
  C-term NH2
LTFAEYWAQAASAA

SEQ ID NO: 947 - protein, 14 aa, Artificial Sequence
  Description of Artificial Sequence: Synthetic peptide
  N-term Ac
  MOD_RES (4)..(4): Alpha-Me R8-octenyl-alanine olefin amino acid connected by an all-carbon crosslinker comprising one double bond
  misc_feature (4)..(11): Crosslink between residues
  MOD_RES (10)..(10): Cyclopentyl-Gly
  MOD_RES (11)..(11): Alpha-Me S5-pentenyl-alanine olefin amino acid connected by an all-carbon crosslinker comprising one double bond
  C-term NH2
LTFAEYWAQGASAA

SEQ ID NO: 948 - protein, 14 aa, Artificial Sequence
  Description of Artificial Sequence: Synthetic peptide
  N-term Ac
  MOD_RES (4)..(4): Alpha-Me R8-octenyl-alanine olefin amino acid connected by an all-carbon crosslinker comprising one double bond
  misc_feature (4)..(11): Crosslink between residues
  MOD_RES (10)..(10): Cyclopentyl-Gly
  MOD_RES (11)..(11): Alpha-Me S5-pentenyl-alanine olefin amino acid connected by an all-carbon crosslinker comprising one double bond
  C-term NH2
LTFAEYWAQGASAA

SEQ ID NO: 949 - protein, 14 aa, Artificial Sequence
  Description of Artificial Sequence: Synthetic peptide
  N-term Ac
  MOD_RES (4)..(4): Alpha-Me R8-octenyl-alanine olefin amino acid connected by an all-carbon crosslinker comprising one double bond
  misc_feature (4)..(11): Crosslink between residues
  MOD_RES (11)..(11): Alpha-Me S5-pentenyl-alanine olefin amino acid connected by an all-carbon crosslinker comprising one double bond
  C-term NH2
LTFAEYWAQFASAA

SEQ ID NO: 950 - protein, 14 aa, Artificial Sequence
  Description of Artificial Sequence: Synthetic peptide
  N-term Ac
  MOD_RES (4)..(4): Alpha-Me R8-octenyl-alanine olefin amino acid connected by an all-carbon crosslinker comprising one double bond
  misc_feature (4)..(11): Crosslink between residues
  MOD_RES (11)..(11): Alpha-Me S5-pentenyl-alanine olefin amino acid connected by an all-carbon crosslinker comprising one double bond
  C-term NH2
LTFAEYWAQFASAA

SEQ ID NO: 951 - protein, 14 aa, Artificial Sequence
  Description of Artificial Sequence: Synthetic peptide
  N-term Ac
  MOD_RES (4)..(4): Alpha-Me R8-octenyl-alanine olefin amino acid connected by an all-carbon crosslinker comprising one double bond
  misc_feature (4)..(11): Crosslink between residues
  MOD_RES (10)..(10): Cyclobutyl-Ala
  MOD_RES (11)..(11): Alpha-Me S5-pentenyl-alanine olefin amino acid connected by an all-carbon crosslinker comprising one double bond
  C-term NH2
LTFAEYWAQAASAA

SEQ ID NO: 952 - protein, 14 aa, Artificial Sequence
  Description of Artificial Sequence: Synthetic peptide
  N-term Ac
  MOD_RES (4)..(4): Alpha-Me R8-octenyl-alanine olefin amino acid connected by an all-carbon crosslinker comprising one double bond
  misc_feature (4)..(11): Crosslink between residues
  MOD_RES (10)..(10): Cyclobutyl-Ala
  MOD_RES (11)..(11): Alpha-Me S5-pentenyl-alanine olefin amino acid connected by an all-carbon crosslinker comprising one double bond
  C-term NH2
LTFAEYWAQAASAA

SEQ ID NO: 953 - protein, 14 aa, Artificial Sequence
  Description of Artificial Sequence: Synthetic peptide
  N-term Ac
  MOD_RES (3)..(3): 3-Chloro-Phe
  MOD_RES (4)..(4): Alpha-Me R8-octenyl-alanine olefin amino acid connected by an all-carbon crosslinker comprising one double bond
  misc_feature (4)..(11): Crosslink between residues
  MOD_RES (11)..(11): Alpha-Me S5-pentenyl-alanine olefin amino acid connected by an all-carbon crosslinker comprising one double bond
  C-term NH2
LTFAEYWAQLASAA

SEQ ID NO: 954 - protein, 14 aa, Artificial Sequence
  Description of Artificial Sequence: Synthetic peptide
  N-term Ac
  MOD_RES (3)..(3): 3-Chloro-Phe
  MOD_RES (4)..(4): Alpha-Me R8-octenyl-alanine olefin amino acid connected by an all-carbon crosslinker comprising one double bond
  misc_feature (4)..(11): Crosslink between residues
  MOD_RES (11)..(11): Alpha-Me S5-pentenyl-alanine olefin amino acid connected by an all-carbon crosslinker comprising one double bond
  C-term NH2
LTFAEYWAQLASAA

SEQ ID NO: 955 - protein, 14 aa, Artificial Sequence
  Description of Artificial Sequence: Synthetic peptide
  N-term Ac
  MOD_RES (3)..(3): 3,4-difluoro Phe
  MOD_RES (4)..(4): Alpha-Me R8-octenyl-alanine olefin amino acid connected by an all-carbon crosslinker comprising one double bond
  misc_feature (4)..(11): Crosslink between residues
  MOD_RES (11)..(11): Alpha-Me S5-pentenyl-alanine olefin amino acid connected by an all-carbon crosslinker comprising one double bond
  C-term NH2
LTFAEYWAQLASAA

SEQ ID NO: 956 - protein, 14 aa, Artificial Sequence
  Description of Artificial Sequence: Synthetic peptide
  N-term Ac
  MOD_RES (3)..(3): 3,4-difluoro Phe
  MOD_RES (4)..(4): Alpha-Me R8-octenyl-alanine olefin amino acid connected by an all-carbon crosslinker comprising one double bond
  misc_feature (4)..(11): Crosslink between residues
  MOD_RES (11)..(11): Alpha-Me S5-pentenyl-alanine olefin amino acid connected by an all-carbon crosslinker comprising one double bond
  C-term NH2
LTFAEYWAQLASAA

SEQ ID NO: 957 - protein, 14 aa, Artificial Sequence
  Description of Artificial Sequence: Synthetic peptide
  N-term Ac
  MOD_RES (3)..(3): 3,4-difluoro Phe
  MOD_RES (4)..(4): Alpha-Me R8-octenyl-alanine olefin amino acid connected by an all-carbon crosslinker comprising one double bond
  misc_feature (4)..(11): Crosslink between residues
  MOD_RES (10)..(10): hLeu
  MOD_RES (11)..(11): Alpha-Me S5-pentenyl-alanine olefin amino acid connected by an all-carbon crosslinker comprising one double bond
  C-term NH2
LTFAEYWAQLASAA

SEQ ID NO: 958 - protein, 14 aa, Artificial Sequence
  Description of Artificial Sequence: Synthetic peptide
  N-term Ac
  MOD_RES (3)..(3): 3,4-difluoro Phe
  MOD_RES (4)..(4): Alpha-Me R8-octenyl-alanine olefin amino acid connected by an all-carbon crosslinker comprising one double bond
  misc_feature (4)..(11): Crosslink between residues
  MOD_RES (10)..(10): hLeu
  MOD_RES (11)..(11): Alpha-Me S5-pentenyl-alanine olefin amino acid connected by an all-carbon crosslinker comprising one double bond
  C-term NH2
LTFAEYWAQLASAA

SEQ ID NO: 959 - protein, 14 aa, Artificial Sequence
  Description of Artificial Sequence: Synthetic peptide
  N-term Ac
  MOD_RES (4)..(4): Alpha-Me R8-octenyl-alanine olefin amino acid connected by an all-carbon crosslinker comprising one double bond
  misc_feature (4)..(11): Crosslink between residues
  MOD_RES (11)..(11): Alpha-Me S5-pentenyl-alanine olefin amino acid connected by an all-carbon crosslinker comprising one double bond
  C-term NH2
ETFAEYWAQLASAA

SEQ ID NO: 960 - protein, 14 aa, Artificial Sequence
  Description of Artificial Sequence: Synthetic peptide
  N-term Ac
  MOD_RES (4)..(4): Alpha-Me R8-octenyl-alanine olefin amino acid connected by an all-carbon crosslinker comprising one double bond
  misc_feature (4)..(11): Crosslink between residues
  MOD_RES (11)..(11): Alpha-Me S5-pentenyl-alanine olefin amino acid connected by an all-carbon crosslinker comprising one double bond
  C-term NH2
LTFAAYWVQLASAA

SEQ ID NO: 961 - protein, 14 aa, Artificial Sequence
  Description of Artificial Sequence: Synthetic peptide
  N-term Ac
  MOD_RES (4)..(4): Alpha-Me R8-octenyl-alanine olefin amino acid connected by an all-carbon crosslinker comprising one double bond
  misc_feature (4)..(11): Crosslink between residues
  MOD_RES (11)..(11): Alpha-Me S5-pentenyl-alanine olefin amino acid connected by an all-carbon crosslinker comprising one double bond
  C-term NH2
LTFAAHWAQLASAA

SEQ ID NO: 962 - protein, 14 aa, Artificial Sequence
  Description of Artificial Sequence: Synthetic peptide
  N-term Ac
  MOD_RES (4)..(4): Alpha-Me R8-octenyl-alanine olefin amino acid connected by an all-carbon crosslinker comprising one double bond
  misc_feature (4)..(11): Crosslink between residues
  MOD_RES (11)..(11): Alpha-Me S5-pentenyl-alanine olefin amino acid connected by an all-carbon crosslinker comprising one double bond
  C-term NH2
LTFAAEWAQLASAA

SEQ ID NO: 963 - protein, 14 aa, Artificial Sequence
  Description of Artificial Sequence: Synthetic peptide
  N-term Ac
  MOD_RES (4)..(4): Alpha-Me R8-octenyl-alanine olefin amino acid connected by an all-carbon crosslinker comprising one double bond
  misc_feature (4)..(11): Crosslink between residues
  MOD_RES (11)..(11): Alpha-Me S5-pentenyl-alanine olefin amino acid connected by an all-carbon crosslinker comprising one double bond
  C-term NH2
LTFAASWAQLASAA

SEQ ID NO: 964 - protein, 14 aa, Artificial Sequence
  Description of Artificial Sequence: Synthetic peptide
  N-term Ac
  MOD_RES (4)..(4): Alpha-Me R8-octenyl-alanine olefin amino acid connected by an all-carbon crosslinker comprising one double bond
  misc_feature (4)..(11): Crosslink between residues
  MOD_RES (11)..(11): Alpha-Me S5-pentenyl-alanine olefin amino acid connected by an all-carbon crosslinker comprising one double bond
  C-term NH2
LTFAAEWAQLASAA

SEQ ID NO: 965 - protein, 14 aa, Artificial Sequence
  Description of Artificial Sequence: Synthetic peptide
  N-term Ac
  MOD_RES (4)..(4): Alpha-Me R8-octenyl-alanine olefin amino acid connected by an all-carbon crosslinker comprising one double bond
  misc_feature (4)..(11): Crosslink between residues
  MOD_RES (11)..(11): Alpha-Me S5-pentenyl-alanine olefin amino acid connected by an all-carbon crosslinker comprising one double bond
  C-term NH2
LTFAASWAQLASAA

SEQ ID NO: 966 - protein, 14 aa, Artificial Sequence
  Description of Artificial Sequence: Synthetic peptide
  N-term Ac
  MOD_RES (4)..(4): Alpha-Me R8-octenyl-alanine olefin amino acid connected by an all-carbon crosslinker comprising one double bond
  misc_feature (4)..(11): Crosslink between residues
  MOD_RES (6)..(6): 4-carboxy Phe
  MOD_RES (11)..(11): Alpha-Me S5-pentenyl-alanine olefin amino acid connected by an all-carbon crosslinker comprising one double bond
  C-term NH2
LTFAAFWAQLASAA

SEQ ID NO: 967 - protein, 14 aa, Artificial Sequence
  Description of Artificial Sequence: Synthetic peptide
  N-term Ac
  MOD_RES (4)..(4): Alpha-Me R8-octenyl-alanine olefin amino acid connected by an all-carbon crosslinker comprising one double bond
  misc_feature (4)..(11): Crosslink between residues
  MOD_RES (6)..(6): 4-carboxy Phe
  MOD_RES (11)..(11): Alpha-Me S5-pentenyl-alanine olefin amino acid connected by an all-carbon crosslinker comprising one double bond
  C-term NH2
LTFAAFWAQLASAA

SEQ ID NO: 968 - protein, 15 aa, Artificial Sequence
  Description of Artificial Sequence: Synthetic peptide
  N-term Ac
  MOD_RES (4)..(4): Alpha-Me R8-octenyl-alanine olefin amino acid connected by an all-carbon crosslinker comprising one double bond
  misc_feature (4)..(11): Crosslink between residues
  MOD_RES (11)..(11): Alpha-Me S5-pentenyl-alanine olefin amino acid connected by an all-carbon crosslinker comprising one double bond
  MOD_RES (15)..(15): D-amino acid
  C-term NH2
LTFAAHWAQLAAAIA

SEQ ID NO: 969 - protein, 15 aa, Artificial Sequence
  Description of Artificial Sequence: Synthetic peptide
  N-term Ac
  MOD_RES (4)..(4): Alpha-Me R8-octenyl-alanine olefin amino acid connected by an all-carbon crosslinker comprising one double bond
  misc_feature (4)..(11): Crosslink between residues
  MOD_RES (11)..(11): Alpha-Me S5-pentenyl-alanine olefin amino acid connected by an all-carbon crosslinker comprising one double bond
  MOD_RES (15)..(15): D-amino acid
  C-term NH2
ITFAFYWAQLAAAIA

SEQ ID NO: 970 - protein, 15 aa, Artificial Sequence
  Description of Artificial Sequence: Synthetic peptide
  N-term Ac
  MOD_RES (4)..(4): Alpha-Me R8-octenyl-alanine olefin amino acid connected by an all-carbon crosslinker comprising one double bond
  misc_feature (4)..(11): Crosslink between residues
  MOD_RES (11)..(11): Alpha-Me S5-pentenyl-alanine olefin amino acid connected by an all-carbon crosslinker comprising one double bond
  MOD_RES (15)..(15): D-amino acid
  C-term NH2
ITFAEHWAQLAAAIA

SEQ ID NO: 971 - protein, 15 aa, Artificial Sequence
  Description of Artificial Sequence: Synthetic peptide
  N-term Ac
  MOD_RES (4)..(4): Alpha-Me R8-octenyl-alanine olefin amino acid connected by an all-carbon crosslinker comprising one double bond
  misc_feature (4)..(11): Crosslink between residues
  MOD_RES (11)..(11): Alpha-Me S5-pentenyl-alanine olefin amino acid connected by an all-carbon crosslinker comprising one double bond
  MOD_RES (15)..(15): D-amino acid
  C-term NH2
ITFAEHWAQLAAAIA

SEQ ID NO: 972 - protein, 15 aa, Artificial Sequence
  Description of Artificial Sequence: Synthetic peptide
  N-term Ac
  MOD_RES (4)..(4): Alpha-Me R8-octenyl-alanine olefin amino acid connected by an all-carbon crosslinker comprising one double bond
  misc_feature (4)..(11): Crosslink between residues
  MOD_RES (11)..(11): Alpha-Me S5-pentenyl-alanine olefin amino acid connected by an all-carbon crosslinker comprising one double bond
  MOD_RES (15)..(15): D-amino acid
  C-term NH2
ETFAEHWAQLAAAIA

SEQ ID NO: 973 - protein, 15 aa, Artificial Sequence
  Description of Artificial Sequence: Synthetic peptide
  N-term Ac
  MOD_RES (4)..(4): Alpha-Me R8-octenyl-alanine olefin amino acid connected by an all-carbon crosslinker comprising one double bond
  misc_feature (4)..(11): Crosslink between residues
  MOD_RES (11)..(11): Alpha-Me S5-pentenyl-alanine olefin amino acid connected by an all-carbon crosslinker comprising one double bond
  MOD_RES (15)..(15): D-amino acid
  C-term NH2
ETFAEHWAQLAAAIA

SEQ ID NO: 974 - protein, 15 aa, Artificial Sequence
  Description of Artificial Sequence: Synthetic peptide
  N-term Ac
  MOD_RES (4)..(4): Alpha-Me R8-octenyl-alanine olefin amino acid connected by an all-carbon crosslinker comprising one double bond
  misc_feature (4)..(11): Crosslink between residues
  MOD_RES (11)..(11): Alpha-Me S5-pentenyl-alanine olefin amino acid connected by an all-carbon crosslinker comprising one double bond
  MOD_RES (15)..(15): D-amino acid
  C-term NH2
LTFAAHWVQLAAAIA

SEQ ID NO: 975 - protein, 15 aa, Artificial Sequence
  Description of Artificial Sequence: Synthetic peptide
  N-term Ac
  MOD_RES (4)..(4): Alpha-Me R8-octenyl-alanine olefin amino acid connected by an all-carbon crosslinker comprising one double bond
  misc_feature (4)..(11): Crosslink between residues
  MOD_RES (11)..(11): Alpha-Me S5-pentenyl-alanine olefin amino acid connected by an all-carbon crosslinker comprising one double bond
  MOD_RES (15)..(15): D-amino acid
  C-term NH2
ITFAFYWVQLAAAIA

SEQ ID NO: 976 - protein, 15 aa, Artificial Sequence
  Description of Artificial Sequence: Synthetic peptide
  N-term Ac
  MOD_RES (4)..(4): Alpha-Me R8-octenyl-alanine olefin amino acid connected by an all-carbon crosslinker comprising one double bond
  misc_feature (4)..(11): Crosslink between residues
  MOD_RES (11)..(11): Alpha-Me S5-pentenyl-alanine olefin amino acid connected by an all-carbon crosslinker comprising one double bond
  MOD_RES (15)..(15): D-amino acid
  C-term NH2
ITFAEYWVQLAAAIA

SEQ ID NO: 977 - protein, 15 aa, Artificial Sequence
  Description of Artificial Sequence: Synthetic peptide
  N-term Ac
  MOD_RES (4)..(4): Alpha-Me R8-octenyl-alanine olefin amino acid connected by an all-carbon crosslinker comprising one double bond
  misc_feature (4)..(11): Crosslink between residues
  MOD_RES (11)..(11): Alpha-Me S5-pentenyl-alanine olefin amino acid connected by an all-carbon crosslinker comprising one double bond
  MOD_RES (15)..(15): D-amino acid
  C-term NH2
ITFAEHWVQLAAAIA

SEQ ID NO: 978 - protein, 15 aa, Artificial Sequence
  Description of Artificial Sequence: Synthetic peptide
  N-term Ac
  MOD_RES (4)..(4): Alpha-Me R8-octenyl-alanine olefin amino acid connected by an all-carbon crosslinker comprising one double bond
  misc_feature (4)..(11): Crosslink between residues
  MOD_RES (11)..(11): Alpha-Me S5-pentenyl-alanine olefin amino acid connected by an all-carbon crosslinker comprising one double bond
  MOD_RES (15)..(15): D-amino acid
  C-term NH2
LTFAAEWAQLAAAIA

SEQ ID NO: 979 - protein, 15 aa, Artificial Sequence
  Description of Artificial Sequence: Synthetic peptide
  N-term Ac
  MOD_RES (4)..(4): Alpha-Me R8-octenyl-alanine olefin amino acid connected by an all-carbon crosslinker comprising one double bond
  misc_feature (4)..(11): Crosslink between residues
  MOD_RES (6)..(6): 4-carboxy Phe
  MOD_RES (11)..(11): Alpha-Me S5-pentenyl-alanine olefin amino acid connected by an all-carbon crosslinker comprising one double bond
  MOD_RES (15)..(15): D-amino acid
  C-term NH2
LTFAAFWAQLAAAIA

SEQ ID NO: 980 - protein, 15 aa, Artificial Sequence
  Description of Artificial Sequence: Synthetic peptide
  N-term Ac
  MOD_RES (4)..(4): Alpha-Me R8-octenyl-alanine olefin amino acid connected by an all-carbon crosslinker comprising one double bond
  misc_feature (4)..(11): Crosslink between residues
  MOD_RES (6)..(6): 4-carboxy Phe
  MOD_RES (11)..(11): Alpha-Me S5-pentenyl-alanine olefin amino acid connected by an all-carbon crosslinker comprising one double bond
  MOD_RES (15)..(15): D-amino acid
  C-term NH2
LTFAAFWAQLAAAIA

SEQ ID NO: 981 - protein, 15 aa, Artificial Sequence
  Description of Artificial Sequence: Synthetic peptide
  N-term Ac
  MOD_RES (4)..(4): Alpha-Me R8-octenyl-alanine olefin amino acid connected by an all-carbon crosslinker comprising one double bond
  misc_feature (4)..(11): Crosslink between residues
  MOD_RES (11)..(11): Alpha-Me S5-pentenyl-alanine olefin amino acid connected by an all-carbon crosslinker comprising one double bond
  C-term NH2
LTFAAHWAQLAAHFA

SEQ ID NO: 982 - protein, 15 aa, Artificial Sequence
  Description of Artificial Sequence: Synthetic peptide
  N-term Ac
  MOD_RES (4)..(4): Alpha-Me R8-octenyl-alanine olefin amino acid connected by an all-carbon crosslinker comprising one double bond
  misc_feature (4)..(11): Crosslink between residues
  MOD_RES (11)..(11): Alpha-Me S5-pentenyl-alanine olefin amino acid connected by an all-carbon crosslinker comprising one double bond
  C-term NH2
ITFAFYWAQLAAHFA

SEQ ID NO: 983 - protein, 15 aa, Artificial Sequence
  Description of Artificial Sequence: Synthetic peptide
  N-term Ac
  MOD_RES (4)..(4): Alpha-Me R8-octenyl-alanine olefin amino acid connected by an all-carbon crosslinker comprising one double bond
  misc_feature (4)..(11): Crosslink between residues
  MOD_RES (11)..(11): Alpha-Me S5-pentenyl-alanine olefin amino acid connected by an all-carbon crosslinker comprising one double bond
  C-term NH2
ITFAFYWAQLAAHFA

SEQ ID NO: 984 - protein, 15 aa, Artificial Sequence
  Description of Artificial Sequence: Synthetic peptide
  N-term Ac
  MOD_RES (4)..(4): Alpha-Me R8-octenyl-alanine olefin amino acid connected by an all-carbon crosslinker comprising one double bond
  misc_feature (4)..(11): Crosslink between residues
  MOD_RES (11)..(11): Alpha-Me S5-pentenyl-alanine olefin amino acid connected by an all-carbon crosslinker comprising one double bond
  C-term NH2
ITFAFHWAQLAAEFA

SEQ ID NO: 985 - protein, 15 aa, Artificial Sequence
  Description of Artificial Sequence: Synthetic peptide
  N-term Ac
  MOD_RES (4)..(4): Alpha-Me R8-octenyl-alanine olefin amino acid connected by an all-carbon crosslinker comprising one double bond
  misc_feature (4)..(11): Crosslink between residues
  MOD_RES (11)..(11): Alpha-Me S5-pentenyl-alanine olefin amino acid connected by an all-carbon crosslinker comprising one double bond
  C-term NH2
ITFAFHWAQLAAEFA

SEQ ID NO: 986 - protein, 15 aa, Artificial Sequence
  Description of Artificial Sequence: Synthetic peptide
  N-term Ac
  MOD_RES (4)..(4): Alpha-Me R8-octenyl-alanine olefin amino acid connected by an all-carbon crosslinker comprising one double bond
  misc_feature (4)..(11): Crosslink between residues
  MOD_RES (11)..(11): Alpha-Me S5-pentenyl-alanine olefin amino acid connected by an all-carbon crosslinker comprising one double bond
  C-term NH2
ITFAEHWAQLAAHFA

SEQ ID NO: 987 - protein, 15 aa, Artificial Sequence
  Description of Artificial Sequence: Synthetic peptide
  N-term Ac
  MOD_RES (4)..(4): Alpha-Me R8-octenyl-alanine olefin amino acid connected by an all-carbon crosslinker comprising one double bond
  misc_feature (4)..(11): Crosslink between residues
  MOD_RES (11)..(11): Alpha-Me S5-pentenyl-alanine olefin amino acid connected by an all-carbon crosslinker comprising one double bond
  C-term NH2
ITFAEHWAQLAAHFA

SEQ ID NO: 988 - protein, 15 aa, Artificial Sequence
  Description of Artificial Sequence: Synthetic peptide
  N-term Ac
  MOD_RES (4)..(4): Alpha-Me R8-octenyl-alanine olefin amino acid connected by an all-carbon crosslinker comprising one double bond
  misc_feature (4)..(11): Crosslink between residues
  MOD_RES (11)..(11): Alpha-Me S5-pentenyl-alanine olefin amino acid connected by an all-carbon crosslinker comprising one double bond
  C-term NH2
LTFAAHWVQLAAHFA

SEQ ID NO: 989 - protein, 15 aa, Artificial Sequence
  Description of Artificial Sequence: Synthetic peptide
  N-term Ac
  MOD_RES (4)..(4): Alpha-Me R8-octenyl-alanine olefin amino acid connected by an all-carbon crosslinker comprising one double bond
  misc_feature (4)..(11): Crosslink between residues
  MOD_RES (11)..(11): Alpha-Me S5-pentenyl-alanine olefin amino acid connected by an all-carbon crosslinker comprising one double bond
  C-term NH2
ITFAFYWVQLAAHFA

SEQ ID NO: 990 - protein, 15 aa, Artificial Sequence
  Description of Artificial Sequence: Synthetic peptide
  N-term Ac
  MOD_RES (4)..(4): Alpha-Me R8-octenyl-alanine olefin amino acid connected by an all-carbon crosslinker comprising one double bond
  misc_feature (4)..(11): Crosslink between residues
  MOD_RES (11)..(11): Alpha-Me S5-pentenyl-alanine olefin amino acid connected by an all-carbon crosslinker comprising one double bond
  C-term NH2
ITFAEYWVQLAAHFA

SEQ ID NO: 991 - protein, 15 aa, Artificial Sequence
  Description of Artificial Sequence: Synthetic peptide
  N-term Ac
  MOD_RES (4)..(4): Alpha-Me R8-octenyl-alanine olefin amino acid connected by an all-carbon crosslinker comprising one double bond
  misc_feature (4)..(11): Crosslink between residues
  MOD_RES (11)..(11): Alpha-Me S5-pentenyl-alanine olefin amino acid connected by an all-carbon crosslinker comprising one double bond
  C-term NH2
ITFAEHWVQLAAHFA

SEQ ID NO: 992 - protein, 15 aa, Artificial Sequence
  Description of Artificial Sequence: Synthetic peptide
  N-term Ac
  MOD_RES (4)..(4): Alpha-Me R8-octenyl-alanine olefin amino acid connected by an all-carbon crosslinker comprising one double bond
  misc_feature (4)..(11): Crosslink between residues
  MOD_RES (11)..(11): Alpha-Me S5-pentenyl-alanine olefin amino acid connected by an all-carbon crosslinker comprising one double bond
  C-term NH2
ITFAEHWVQLAAHFA

SEQ ID NO: 993 - protein, 14 aa, Artificial Sequence
  Description of Artificial Sequence: Synthetic peptide
  N-term Ac
  MOD_RES (4)..(4): Alpha-Me R8-octenyl-alanine olefin amino acid connected by an all-carbon crosslinker comprising one double bond
  misc_feature (4)..(11): Crosslink between residues
  MOD_RES (11)..(11): Alpha-Me S5-pentenyl-alanine olefin amino acid connected by an all-carbon crosslinker comprising one double bond
  C-term NH2
ETFAEYWAALASAA

SEQ ID NO: 994 - protein, 14 aa, Artificial Sequence
  Description of Artificial Sequence: Synthetic peptide
  N-term Ac
  MOD_RES (4)..(4): Alpha-Me R8-octenyl-alanine olefin amino acid connected by an all-carbon crosslinker comprising one double bond
  misc_feature (4)..(11): Crosslink between residues
  MOD_RES (11)..(11): Alpha-Me S5-pentenyl-alanine olefin amino acid connected by an all-carbon crosslinker comprising one double bond
  C-term NH2
LTFAAYWVALASAA

SEQ ID NO: 995 - protein, 14 aa, Artificial Sequence
  Description of Artificial Sequence: Synthetic peptide
  N-term Ac
  MOD_RES (4)..(4): Alpha-Me R8-octenyl-alanine olefin amino acid connected by an all-carbon crosslinker comprising one double bond
  misc_feature (4)..(11): Crosslink between residues
  MOD_RES (11)..(11): Alpha-Me S5-pentenyl-alanine olefin amino acid connected by an all-carbon crosslinker comprising one double bond
  C-term NH2
LTFAAHWAALASAA

SEQ ID NO: 996 - protein, 14 aa, Artificial Sequence
  Description of Artificial Sequence: Synthetic peptide
  N-term Ac
  MOD_RES (4)..(4): Alpha-Me R8-octenyl-alanine olefin amino acid connected by an all-carbon crosslinker comprising one double bond
  misc_feature (4)..(11): Crosslink between residues
  MOD_RES (11)..(11): Alpha-Me S5-pentenyl-alanine olefin amino acid connected by an all-carbon crosslinker comprising one double bond
  C-term NH2
LTFAAEWAALASAA

SEQ ID NO: 997 - protein, 14 aa, Artificial Sequence
  Description of Artificial Sequence: Synthetic peptide
  N-term Ac
  MOD_RES (4)..(4): Alpha-Me R8-octenyl-alanine olefin amino acid connected by an all-carbon crosslinker comprising one double bond
  misc_feature (4)..(11): Crosslink between residues
  MOD_RES (11)..(11): Alpha-Me S5-pentenyl-alanine olefin amino acid connected by an all-carbon crosslinker comprising one double bond
  C-term NH2
LTFAAEWAALASAA

SEQ ID NO: 998 - protein, 14 aa, Artificial Sequence
  Description of Artificial Sequence: Synthetic peptide
  N-term Ac
  MOD_RES (4)..(4): Alpha-Me R8-octenyl-alanine olefin amino acid connected by an all-carbon crosslinker comprising one double bond
  misc_feature (4)..(11): Crosslink between residues
  MOD_RES (11)..(11): Alpha-Me S5-pentenyl-alanine olefin amino acid connected by an all-carbon crosslinker comprising one double bond
  C-term NH2
LTFAASWAALASAA

SEQ ID NO: 999 - protein, 14 aa, Artificial Sequence
  Description of Artificial Sequence: Synthetic peptide
  N-term Ac
  MOD_RES (4)..(4): Alpha-Me R8-octenyl-alanine olefin amino acid connected by an all-carbon crosslinker comprising one double bond
  misc_feature (4)..(11): Crosslink between residues
  MOD_RES (11)..(11): Alpha-Me S5-pentenyl-alanine olefin amino acid connected by an all-carbon crosslinker comprising one double bond
  C-term NH2
LTFAASWAALASAA

SEQ ID NO: 1000 - protein, 15 aa, Artificial Sequence
  Description of Artificial Sequence: Synthetic peptide
  N-term Ac
  MOD_RES (4)..(4): Alpha-Me R8-octenyl-alanine olefin amino acid connected by an all-carbon crosslinker comprising one double bond
  misc_feature (4)..(11): Crosslink between residues
  MOD_RES (11)..(11): Alpha-Me S5-pentenyl-alanine olefin amino acid connected by an all-carbon crosslinker comprising one double bond
  MOD_RES (15)..(15): D-amino acid
  C-term NH2
LTFAAYWAALAAAIA

SEQ ID NO: 1001 - protein, 15 aa, Artificial Sequence
  Description of Artificial Sequence: Synthetic peptide
  N-term Ac
  MOD_RES (4)..(4): Alpha-Me R8-octenyl-alanine olefin amino acid connected by an all-carbon crosslinker comprising one double bond
  misc_feature (4)..(11): Crosslink between residues
  MOD_RES (11)..(11): Alpha-Me S5-pentenyl-alanine olefin amino acid connected by an all-carbon crosslinker comprising one double bond
  MOD_RES (15)..(15): D-amino acid
  C-term NH2
LTFAAYWAALAAAIA

SEQ ID NO: 1002 - protein, 15 aa, Artificial Sequence
  Description of Artificial Sequence: Synthetic peptide
  N-term Ac
  MOD_RES (4)..(4): Alpha-Me R8-octenyl-alanine olefin amino acid connected by an all-carbon crosslinker comprising one double bond
  misc_feature (4)..(11): Crosslink between residues
  MOD_RES (11)..(11): Alpha-Me S5-pentenyl-alanine olefin amino acid connected by an all-carbon crosslinker comprising one double bond
  C-term NH2
LTFAAYWAALAAHFA

SEQ ID NO: 1003 - protein, 15 aa, Artificial Sequence
  Description of Artificial Sequence: Synthetic peptide
  N-term Ac
  MOD_RES (4)..(4): Alpha-Me R8-octenyl-alanine olefin amino acid connected by an all-carbon crosslinker comprising one double bond
  misc_feature (4)..(11): Crosslink between residues
  MOD_RES (11)..(11): Alpha-Me S5-pentenyl-alanine olefin amino acid connected by an all-carbon crosslinker comprising one double bond
  MOD_RES (15)..(15): D-amino acid
  C-term NH2
LTFAEHWAQLAAHIA

SEQ ID NO: 1004 - protein, 15 aa, Artificial Sequence
  Description of Artificial Sequence: Synthetic peptide
  N-term Ac
  MOD_RES (4)..(4): Alpha-Me R8-octenyl-alanine olefin amino acid connected by an all-carbon crosslinker comprising one double bond
  misc_feature (4)..(11): Crosslink between residues
  MOD_RES (11)..(11): Alpha-Me S5-pentenyl-alanine olefin amino acid connected by an all-carbon crosslinker comprising one double bond
  MOD_RES (15)..(15): D-amino acid
  C-term NH2
LTFAEHWAQLAAHIA

SEQ ID NO: 1005 - protein, 15 aa, Artificial Sequence
  Description of Artificial Sequence: Synthetic peptide
  N-term Ac
  MOD_RES (4)..(4): Alpha-Me R8-octenyl-alanine olefin amino acid connected by an all-carbon crosslinker comprising one double bond
  misc_feature (4)..(11): Crosslink between residues
  MOD_RES (11)..(11): Alpha-Me S5-pentenyl-alanine olefin amino acid connected by an all-carbon crosslinker comprising one double bond
  MOD_RES (15)..(15): D-amino acid
  C-term NH2
LTFAAHWAQLAAHIA

SEQ ID NO: 1006 - protein, 15 aa, Artificial Sequence
  Description of Artificial Sequence: Synthetic peptide
  N-term Ac
  MOD_RES (4)..(4): Alpha-Me R8-octenyl-alanine olefin amino acid connected by an all-carbon crosslinker comprising one double bond
  misc_feature (4)..(11): Crosslink between residues
  MOD_RES (11)..(11): Alpha-Me S5-pentenyl-alanine olefin amino acid connected by an all-carbon crosslinker comprising one double bond
  MOD_RES (15)..(15): D-amino acid
  C-term NH2
LTFAEYWAQLAAHIA

SEQ ID NO: 1007 - protein, 15 aa, Artificial Sequence
  Description of Artificial Sequence: Synthetic peptide
  N-term Ac
  MOD_RES (4)..(4): Alpha-Me R8-octenyl-alanine olefin amino acid connected by an all-carbon crosslinker comprising one double bond
  misc_feature (4)..(11): Crosslink between residues
  MOD_RES (11)..(11): Alpha-Me S5-pentenyl-alanine olefin amino acid connected by an all-carbon crosslinker comprising one double bond
  MOD_RES (15)..(15): D-amino acid
  C-term NH2
LTFAAYWAQLAAAFA

SEQ ID NO: 1008 - protein, 15 aa, Artificial Sequence
  Description of Artificial Sequence: Synthetic peptide
  N-term Ac
  MOD_RES (4)..(4): Alpha-Me R8-octenyl-alanine olefin amino acid connected by an all-carbon crosslinker comprising one double bond
  misc_feature (4)..(11): Crosslink between residues
  MOD_RES (11)..(11): Alpha-Me S5-pentenyl-alanine olefin amino acid connected by an all-carbon crosslinker comprising one double bond
  MOD_RES (15)..(15): D-amino acid
  C-term NH2
LTFAAYWAQLAAAFA

SEQ ID NO: 1009 - protein, 15 aa, Artificial Sequence
  Description of Artificial Sequence: Synthetic peptide
  N-term Ac
  MOD_RES (4)..(4): Alpha-Me R8-octenyl-alanine olefin amino acid connected by an all-carbon crosslinker comprising one double bond
  misc_feature (4)..(11): Crosslink between residues
  MOD_RES (11)..(11): Alpha-Me S5-pentenyl-alanine olefin amino acid connected by an all-carbon crosslinker comprising one double bond
  MOD_RES (15)..(15): D-amino acid
  C-term NH2
LTFAAYWAQLAAAWA

SEQ ID NO: 1010 - protein, 15 aa, Artificial Sequence
  Description of Artificial Sequence: Synthetic peptide
  N-term Ac
  MOD_RES (4)..(4): Alpha-Me R8-octenyl-alanine olefin amino acid connected by an all-carbon crosslinker comprising one double bond
  misc_feature (4)..(11): Crosslink between residues
  MOD_RES (11)..(11): Alpha-Me S5-pentenyl-alanine olefin amino acid connected by an all-carbon crosslinker comprising one double bond
  MOD_RES (15)..(15): D-amino acid
  C-term NH2
LTFAAYWAQLAAAVA

SEQ ID NO: 1011 - protein, 15 aa, Artificial Sequence
  Description of Artificial Sequence: Synthetic peptide
  N-term Ac
  MOD_RES (4)..(4): Alpha-Me R8-octenyl-alanine olefin amino acid connected by an all-carbon crosslinker comprising one double bond
  misc_feature (4)..(11): Crosslink between residues
  MOD_RES (11)..(11): Alpha-Me S5-pentenyl-alanine olefin amino acid connected by an all-carbon crosslinker comprising one double bond
  MOD_RES (15)..(15): D-amino acid
  C-term NH2
LTFAAYWAQLAAAVA

SEQ ID NO: 1012 - protein, 15 aa, Artificial Sequence
  Description of Artificial Sequence: Synthetic peptide
  N-term Ac
  MOD_RES (4)..(4): Alpha-Me R8-octenyl-alanine olefin amino acid connected by an all-carbon crosslinker comprising one double bond
  misc_feature (4)..(11): Crosslink between residues
  MOD_RES (11)..(11): Alpha-Me S5-pentenyl-alanine olefin amino acid connected by an all-carbon crosslinker comprising one double bond
  MOD_RES (15)..(15): D-amino acid
  C-term NH2
LTFAAYWAQLAAALA

SEQ ID NO: 1013 - protein, 15 aa, Artificial Sequence
  Description of Artificial Sequence: Synthetic peptide
  N-term Ac
  MOD_RES (4)..(4): Alpha-Me R8-octenyl-alanine olefin amino acid connected by an all-carbon crosslinker comprising one double bond
  misc_feature (4)..(11): Crosslink between residues
  MOD_RES (11)..(11): Alpha-Me S5-pentenyl-alanine olefin amino acid connected by an all-carbon crosslinker comprising one double bond
  MOD_RES (15)..(15): D-amino acid
  C-term NH2
LTFAAYWAQLAAALA

SEQ ID NO: 1014 - protein, 15 aa, Artificial Sequence
  Description of Artificial Sequence: Synthetic peptide
  N-term Ac
  MOD_RES (4)..(4): Alpha-Me R8-octenyl-alanine olefin amino acid connected by an all-carbon crosslinker comprising one double bond
  misc_feature (4)..(11): Crosslink between residues
  MOD_RES (11)..(11): Alpha-Me S5-pentenyl-alanine olefin amino acid connected by an all-carbon crosslinker comprising one double bond
  MOD_RES (15)..(15): D-amino acid
  C-term NH2
LTFAEYWAQLAAAIA

SEQ ID NO: 1015 - protein, 15 aa, Artificial Sequence
  Description of Artificial Sequence: Synthetic peptide
  N-term Ac
  MOD_RES (4)..(4): Alpha-Me R8-octenyl-alanine olefin amino acid connected by an all-carbon crosslinker comprising one double bond
  misc_feature (4)..(11): Crosslink between residues
  MOD_RES (11)..(11): Alpha-Me S5-pentenyl-alanine olefin amino acid connected by an all-carbon crosslinker comprising one double bond
  MOD_RES (15)..(15): D-amino acid
  C-term NH2
LTFAEYWAQLAAAIA

SEQ ID NO: 1016 - protein, 15 aa, Artificial Sequence
  Description of Artificial Sequence: Synthetic peptide
  N-term Ac
  MOD_RES (4)..(4): Alpha-Me R8-octenyl-alanine olefin amino acid connected by an all-carbon crosslinker comprising one double bond
  misc_feature (4)..(11): Crosslink between residues
  MOD_RES (11)..(11): Alpha-Me S5-pentenyl-alanine olefin amino acid connected by an all-carbon crosslinker comprising one double bond
  MOD_RES (15)..(15): D-amino acid
  C-term NH2
LTFAEYWAQLAAAFA

SEQ ID NO: 1017 - protein, 15 aa, Artificial Sequence
  Description of Artificial Sequence: Synthetic peptide
  N-term Ac
  MOD_RES (4)..(4): Alpha-Me R8-octenyl-alanine olefin amino acid connected by an all-carbon crosslinker comprising one double bond
  misc_feature (4)..(11): Crosslink between residues
  MOD_RES (11)..(11): Alpha-Me S5-pentenyl-alanine olefin amino acid connected by an all-carbon crosslinker comprising one double bond
  MOD_RES (15)..(15): D-amino acid
  C-term NH2
LTFAEYWAQLAAAFA

SEQ ID NO: 1018 - protein, 15 aa, Artificial Sequence
  Description of Artificial Sequence: Synthetic peptide
  N-term Ac
  MOD_RES (4)..(4): Alpha-Me R8-octenyl-alanine olefin amino acid connected by an all-carbon crosslinker comprising one double bond
  misc_feature (4)..(11): Crosslink between residues
  MOD_RES (11)..(11): Alpha-Me S5-pentenyl-alanine olefin amino acid connected by an all-carbon crosslinker comprising one double bond
  MOD_RES (15)..(15): D-amino acid
  C-term NH2
LTFAEYWAQLAAAVA

SEQ ID NO: 1019 - protein, 15 aa, Artificial Sequence
  Description of Artificial Sequence: Synthetic peptide
  N-term Ac
  MOD_RES (4)..(4): Alpha-Me R8-octenyl-alanine olefin amino acid connected by an all-carbon crosslinker comprising one double bond
  misc_feature (4)..(11): Crosslink between residues
  MOD_RES (11)..(11): Alpha-Me S5-pentenyl-alanine olefin amino acid connected by an all-carbon crosslinker comprising one double bond
  MOD_RES (15)..(15): D-amino acid
  C-term NH2
LTFAEYWAQLAAAVA

SEQ ID NO: 1020 - protein, 15 aa, Artificial Sequence
  Description of Artificial Sequence: Synthetic peptide
  N-term Ac
  MOD_RES (4)..(4): Alpha-Me R8-octenyl-alanine olefin amino acid connected by an all-carbon crosslinker comprising one double bond
  misc_feature (4)..(11): Crosslink between residues
  MOD_RES (11)..(11): Alpha-Me S5-pentenyl-alanine olefin amino acid connected by an all-carbon crosslinker comprising one double bond
  MOD_RES (15)..(15): D-amino acid
  C-term NH2
LTFAEHWAQLAAAIA

SEQ ID NO: 1021 - protein, 15 aa, Artificial Sequence
  Description of Artificial Sequence: Synthetic peptide
  N-term Ac
  MOD_RES (4)..(4): Alpha-Me R8-octenyl-alanine olefin amino acid connected by an all-carbon crosslinker comprising one double bond
  misc_feature (4)..(11): Crosslink between residues
  MOD_RES (11)..(11): Alpha-Me S5-pentenyl-alanine olefin amino acid connected by an all-carbon crosslinker comprising one double bond
  MOD_RES (15)..(15): D-amino acid
  C-term NH2
LTFAEHWAQLAAAIA

SEQ ID NO: 1022 - protein, 15 aa, Artificial Sequence
  Description of Artificial Sequence: Synthetic peptide
  N-term Ac
  MOD_RES (4)..(4): Alpha-Me R8-octenyl-alanine olefin amino acid connected by an all-carbon crosslinker comprising one double bond
  misc_feature (4)..(11): Crosslink between residues
  MOD_RES (11)..(11): Alpha-Me S5-pentenyl-alanine olefin amino acid connected by an all-carbon crosslinker comprising one double bond
  MOD_RES (15)..(15): D-amino acid
  C-term NH2
LTFAEHWAQLAAAWA

SEQ ID NO: 1023 - protein, 15 aa, Artificial Sequence
  Description of Artificial Sequence: Synthetic peptide
  N-term Ac
  MOD_RES (4)..(4): Alpha-Me R8-octenyl-alanine olefin amino acid connected by an all-carbon crosslinker comprising one double bond
  misc_feature (4)..(11): Crosslink between residues
  MOD_RES (11)..(11): Alpha-Me S5-pentenyl-alanine olefin amino acid connected by an all-carbon crosslinker comprising one double bond
  MOD_RES (15)..(15): D-amino acid
  C-term NH2
LTFAEHWAQLAAAWA

SEQ ID NO: 1024 - protein, 15 aa, Artificial Sequence
  Description of Artificial Sequence: Synthetic peptide
  N-term Ac
  MOD_RES (4)..(4): Alpha-Me R8-octenyl-alanine olefin amino acid connected by an all-carbon crosslinker comprising one double bond
  misc_feature (4)..(11): Crosslink between residues
  MOD_RES (11)..(11): Alpha-Me S5-pentenyl-alanine olefin amino acid connected by an all-carbon crosslinker comprising one double bond
  MOD_RES (15)..(15): D-amino acid
  C-term NH2
LTFAEHWAQLAAALA

SEQ ID NO: 1025 - protein, 15 aa, Artificial Sequence
  Description of Artificial Sequence: Synthetic peptide
  N-term Ac
  MOD_RES (4)..(4): Alpha-Me R8-octenyl-alanine olefin amino acid connected by an all-carbon crosslinker comprising one double bond
  misc_feature (4)..(11): Crosslink between residues
  MOD_RES (11)..(11): Alpha-Me S5-pentenyl-alanine olefin amino acid connected by an all-carbon crosslinker comprising one double bond
  MOD_RES (15)..(15): D-amino acid
  C-term NH2
LTFAEHWAQLAAALA

SEQ ID NO: 1026 - protein, 15 aa, Artificial Sequence
  Description of Artificial Sequence: Synthetic peptide
  N-term Ac
  MOD_RES (4)..(4): Alpha-Me R8-octenyl-alanine olefin amino acid connected by an all-carbon crosslinker comprising one double bond
  misc_feature (4)..(11): Crosslink between residues
  MOD_RES (11)..(11): Alpha-Me S5-pentenyl-alanine olefin amino acid connected by an all-carbon crosslinker comprising one double bond
  MOD_RES (15)..(15): D-amino acid
  C-term NH2
ETFAEHWVQLAAALA

SEQ ID NO: 1027 - protein, 15 aa, Artificial Sequence
  Description of Artificial Sequence: Synthetic peptide
  N-term Ac
  MOD_RES (4)..(4): Alpha-Me R8-octenyl-alanine olefin amino acid connected by an all-carbon crosslinker comprising one double bond
  misc_feature (4)..(11): Crosslink between residues
  MOD_RES (11)..(11): Alpha-Me S5-pentenyl-alanine olefin amino acid connected by an all-carbon crosslinker comprising one double bond
  MOD_RES (15)..(15): D-amino acid
  C-term NH2
LTFAAYWAQLAAAAA

SEQ ID NO: 1028 - protein, 15 aa, Artificial Sequence
  Description of Artificial Sequence: Synthetic peptide
  N-term Ac
  MOD_RES (4)..(4): Alpha-Me R8-octenyl-alanine olefin amino acid connected by an all-carbon crosslinker comprising one double bond
  misc_feature (4)..(11): Crosslink between residues
  MOD_RES (11)..(11): Alpha-Me S5-pentenyl-alanine olefin amino acid connected by an all-carbon crosslinker comprising one double bond
  MOD_RES (15)..(15): D-amino acid
  C-term NH2
LTFAAYWAQLAAAAA

SEQ ID NO: 1029 - protein, 15 aa, Artificial Sequence
  Description of Artificial Sequence: Synthetic peptide
  N-term Ac
  MOD_RES (4)..(4): Alpha-Me R8-octenyl-alanine olefin amino acid connected by an all-carbon crosslinker comprising one double bond
  misc_feature (4)..(11): Crosslink between residues
  MOD_RES (11)..(11): Alpha-Me S5-pentenyl-alanine olefin amino acid connected by an all-carbon crosslinker comprising one double bond
  MOD_RES (14)..(14): 2-aminoisobutyric acid
  C-term NH2
LTFAAYWAQLAAAXA

SEQ ID NO: 1030 - protein, 15 aa, Artificial Sequence
  Description of Artificial Sequence: Synthetic peptide
  N-term Ac
  MOD_RES (4)..(4): Alpha-Me R8-octenyl-alanine olefin amino acid connected by an all-carbon crosslinker comprising one double bond
  misc_feature (4)..(11): Crosslink between residues
  MOD_RES (11)..(11): Alpha-Me S5-pentenyl-alanine olefin amino acid connected by an all-carbon crosslinker comprising one double bond
  MOD_RES (14)..(14): 2-aminoisobutyric acid
  C-term NH2
LTFAAYWAQLAAAXA

SEQ ID NO: 1031 - protein, 16 aa, Artificial Sequence
  Description of Artificial Sequence: Synthetic peptide
  N-term Ac
  MOD_RES (4)..(4): Alpha-Me R8-octenyl-alanine olefin amino acid connected by an all-carbon crosslinker comprising one double bond
  misc_feature (4)..(11): Crosslink between residues
  MOD_RES (11)..(11): Alpha-Me S5-pentenyl-alanine olefin amino acid connected by an all-carbon crosslinker comprising one double bond
  MOD_RES (16)..(16): D-amino acid
  C-term NH2
LTFAAYWAQLAAAAAA

SEQ ID NO: 1032 - protein, 15 aa, Artificial Sequence
  Description of Artificial Sequence: Synthetic peptide
  N-term Ac
  MOD_RES (4)..(4): Alpha-Me R5-pentenyl-alanine olefin amino acid connected by an all-carbon crosslinker comprising one double bond
  misc_feature (4)..(11): Crosslink between residues
  MOD_RES (11)..(11): Alpha-Me S8-octenyl-alanine olefin amino acid connected by an all-carbon crosslinker comprising one double bond
  MOD_RES (15)..(15): D-amino acid
  C-term NH2
LTFAAYWAQLAAAIA

SEQ ID NO: 1033 - protein, 14 aa, Artificial Sequence
  Description of Artificial Sequence: Synthetic peptide
  N-term Ac
  MOD_RES (4)..(4): Alpha-Me R5-pentenyl-alanine olefin amino acid connected by an all-carbon crosslinker comprising one double bond
  misc_feature (4)..(11): Crosslink between residues
  MOD_RES (11)..(11): Alpha-Me S8-octenyl-alanine olefin amino acid connected by an all-carbon crosslinker comprising one double bond
  C-term NH2
LTFAAYWAQLASAA

SEQ ID NO: 1034 - protein, 15 aa, Artificial Sequence
  Description of Artificial Sequence: Synthetic peptide
  N-term Ac
  MOD_RES (4)..(4): Alpha-Me R8-octenyl-alanine olefin amino acid connected by an all-carbon crosslinker comprising one double bond
  misc_feature (4)..(11): Crosslink between residues
  MOD_RES (10)..(10): Cyclobutyl-Ala
  MOD_RES (11)..(11): Alpha-Me S5-pentenyl-alanine olefin amino acid connected by an all-carbon crosslinker comprising one double bond
  MOD_RES (14)..(14): Norleucine
  C-term NH2
LTFAAYWAQAAAALA

SEQ ID NO: 1035 - protein, 15 aa, Artificial Sequence
  Description of Artificial Sequence: Synthetic peptide
  N-term Ac
  MOD_RES (4)..(4): Alpha-Me R8-octenyl-alanine olefin amino acid connected by an all-carbon crosslinker comprising one double bond
  misc_feature (4)..(11): Crosslink between residues
  MOD_RES (10)..(10): Cyclobutyl-Ala
  MOD_RES (11)..(11): Alpha-Me S5-pentenyl-alanine olefin amino acid connected by an all-carbon crosslinker comprising one double bond
  MOD_RES (14)..(14): Norleucine
  C-term NH2
ETFAAYWAQAAAALA

SEQ ID NO: 1036 - protein, 15 aa, Artificial Sequence
  Description of Artificial Sequence: Synthetic peptide
  N-term Ac
  MOD_RES (4)..(4): Alpha-Me R8-octenyl-alanine olefin amino acid connected by an all-carbon crosslinker comprising one double bond
  misc_feature (4)..(11): Crosslink between residues
  MOD_RES (10)..(10): Cyclobutyl-Ala
  MOD_RES (11)..(11): Alpha-Me S5-pentenyl-alanine olefin amino acid connected by an all-carbon crosslinker comprising one double bond
  MOD_RES (14)..(14): Norleucine
  C-term NH2
LTFAEYWAQAAAALA

SEQ ID NO: 1037 - protein, 15 aa, Artificial Sequence
  Description of Artificial Sequence: Synthetic peptide
  N-term Ac
  MOD_RES (4)..(4): Alpha-Me R8-octenyl-alanine olefin amino acid connected by an all-carbon crosslinker comprising one double bond
  misc_feature (4)..(11): Crosslink between residues
  MOD_RES (10)..(10): Cyclobutyl-Ala
  MOD_RES (11)..(11): Alpha-Me S5-pentenyl-alanine olefin amino acid connected by an all-carbon crosslinker comprising one double bond
  MOD_RES (14)..(14): Norleucine
  C-term NH2
LTFAAYWAQAAAWLA

SEQ ID NO: 1038 - protein, 15 aa, Artificial Sequence
  Description of Artificial Sequence: Synthetic peptide
  N-term Ac
  MOD_RES (4)..(4): Alpha-Me R8-octenyl-alanine olefin amino acid connected by an all-carbon crosslinker comprising one double bond
  misc_feature (4)..(11): Crosslink between residues
  MOD_RES (10)..(10): Cyclobutyl-Ala
  MOD_RES (11)..(11): Alpha-Me S5-pentenyl-alanine olefin amino acid connected by an all-carbon crosslinker comprising one double bond
  MOD_RES (14)..(14): Norleucine
  C-term NH2
ETFAAYWAQAAAWLA

SEQ ID NO: 1039 - protein, 15 aa, Artificial Sequence
  Description of Artificial Sequence: Synthetic peptide
  N-term Ac
  MOD_RES (4)..(4): Alpha-Me R8-octenyl-alanine olefin amino acid connected by an all-carbon crosslinker comprising one double bond
  misc_feature (4)..(11): Crosslink between residues
  MOD_RES (10)..(10): Cyclobutyl-Ala
  MOD_RES (11)..(11): Alpha-Me S5-pentenyl-alanine olefin amino acid connected by an all-carbon crosslinker comprising one double bond
  MOD_RES (14)..(14): Norleucine
  C-term NH2
LTFAEYWAQAAAWLA

SEQ ID NO: 1040 - protein, 15 aa, Artificial Sequence
  Description of Artificial Sequence: Synthetic peptide
  N-term Ac
  MOD_RES (4)..(4): Alpha-Me R8-octenyl-alanine olefin amino acid connected by an all-carbon crosslinker comprising one double bond
  misc_feature (4)..(11): Crosslink between residues
  MOD_RES (10)..(10): Cyclobutyl-Ala
  MOD_RES (11)..(11): Alpha-Me S5-pentenyl-alanine olefin amino acid connected by an all-carbon crosslinker comprising one double bond
  C-term NH2
LTFAEYWAQAASAFA

SEQ ID NO: 1041 - protein, 15 aa, Artificial Sequence
  Description of Artificial Sequence: Synthetic peptide
  N-term Ac
  MOD_RES (3)..(3): 3,4-difluoro Phe
  MOD_RES (4)..(4): Alpha-Me R8-octenyl-alanine olefin amino acid connected by an all-carbon crosslinker comprising one double bond
  misc_feature (4)..(11): Crosslink between residues
  MOD_RES (10)..(10): Cyclobutyl-Ala
  MOD_RES (11)..(11): Alpha-Me S5-pentenyl-alanine olefin amino acid connected by an all-carbon crosslinker comprising one double bond
  MOD_RES (14)..(14): Norleucine
  C-term NH2
LTFAEYWAQAASALA

SEQ ID NO: 1042 - protein, 15 aa, Artificial Sequence
  Description of Artificial Sequence: Synthetic peptide
  N-term Ac
  MOD_RES (4)..(4): Alpha-Me R8-octenyl-alanine olefin amino acid connected by an all-carbon crosslinker comprising one double bond
  misc_feature (4)..(11): Crosslink between residues
  MOD_RES (6)..(6): 4-carboxy Phe
  MOD_RES (10)..(10): Cyclobutyl-Ala
  MOD_RES (11)..(11): Alpha-Me S5-pentenyl-alanine olefin amino acid connected by an all-carbon crosslinker comprising one double bond
  MOD_RES (14)..(14): Norleucine
  C-term NH2
LTFAEFWAQAASALA

SEQ ID NO: 1043 - protein, 15 aa, Artificial Sequence
  Description of Artificial Sequence: Synthetic peptide
  N-term Ac
  MOD_RES (4)..(4): Alpha-Me R8-octenyl-alanine olefin amino acid connected by an all-carbon crosslinker comprising one double bond
  misc_feature (4)..(11): Crosslink between residues
  MOD_RES (10)..(10): Cyclobutyl-Ala
  MOD_RES (11)..(11): Alpha-Me S5-pentenyl-alanine olefin amino acid connected by an all-carbon crosslinker comprising one double bond
  MOD_RES (14)..(14): Norleucine
  C-term NH2
LTFAEYWSQAASALA

SEQ ID NO: 1044 - protein, 15 aa, Artificial Sequence
  Description of Artificial Sequence: Synthetic peptide
  N-term Ac
  MOD_RES (4)..(4): Alpha-Me R8-octenyl-alanine olefin amino acid connected by an all-carbon crosslinker comprising one double bond
  misc_feature (4)..(11): Crosslink between residues
  MOD_RES (10)..(10): Cyclobutyl-Ala
  MOD_RES (11)..(11): Alpha-Me S5-pentenyl-alanine olefin amino acid connected by an all-carbon crosslinker comprising one double bond
  MOD_RES (14)..(14): Norleucine
  C-term NH2
LTFAEYWWQAASALA

SEQ ID NO: 1045 - protein, 15 aa, Artificial Sequence
  Description of Artificial Sequence: Synthetic peptide
  N-term Ac
  MOD_RES (4)..(4): Alpha-Me R8-octenyl-alanine olefin amino acid connected by an all-carbon crosslinker comprising one double bond
  misc_feature (4)..(11): Crosslink between residues
  MOD_RES (10)..(10): Cyclobutyl-Ala
  MOD_RES (11)..(11): Alpha-Me S5-pentenyl-alanine olefin amino acid connected by an all-carbon crosslinker comprising one double bond
  MOD_RES (15)..(15): D-amino acid
  C-term NH2
LTFAEYWAQAAAAIA

SEQ ID NO: 1046 - protein, 15 aa, Artificial Sequence
  Description of Artificial Sequence: Synthetic peptide
  N-term Ac
  MOD_RES (3)..(3): 3,4-difluoro Phe
  MOD_RES (4)..(4): Alpha-Me R8-octenyl-alanine olefin amino acid connected by an all-carbon crosslinker comprising one double bond
  misc_feature (4)..(11): Crosslink between residues
  MOD_RES (10)..(10): Cyclobutyl-Ala
  MOD_RES (11)..(11): Alpha-Me S5-pentenyl-alanine olefin amino acid connected by an all-carbon crosslinker comprising one double bond
  MOD_RES (15)..(15): D-amino acid
  C-term NH2
LTFAEYWAQAAAAIA

SEQ ID NO: 1047 - protein, 15 aa, Artificial Sequence
  Description of Artificial Sequence: Synthetic peptide
  N-term Ac
  MOD_RES (4)..(4): Alpha-Me R8-octenyl-alanine olefin amino acid connected by an all-carbon crosslinker comprising one double bond
  misc_feature (4)..(11): Crosslink between residues
  MOD_RES (6)..(6): 4-carboxy Phe
  MOD_RES (10)..(10): Cyclobutyl-Ala
  MOD_RES (11)..(11): Alpha-Me S5-pentenyl-alanine olefin amino acid connected by an all-carbon crosslinker comprising one double bond
  MOD_RES (15)..(15): D-amino acid
  C-term NH2
LTFAEFWAQAAAAIA

SEQ ID NO: 1048 - protein, 14 aa, Artificial Sequence
  Description of Artificial Sequence: Synthetic peptide
  N-term Pam
  MOD_RES (4)..(4): Alpha-Me R8-octenyl-alanine olefin amino acid connected by an all-carbon crosslinker comprising one double bond
  misc_feature (4)..(11): Crosslink between residues
  MOD_RES (10)..(10): Cyclobutyl-Ala
  MOD_RES (11)..(11): Alpha-Me S5-pentenyl-alanine olefin amino acid connected by an all-carbon crosslinker comprising one double bond
  C-term NH2
ETFAEYWAQAASAA

SEQ ID NO: 1049 - protein, 14 aa, Artificial Sequence
  Description of Artificial Sequence: Synthetic peptide
  N-term Ac
  MOD_RES (3)..(3): homo-Phe
  MOD_RES (4)..(4): Alpha-Me R8-octenyl-alanine olefin amino acid connected by an all-carbon crosslinker comprising one double bond
  misc_feature (4)..(11): Crosslink between residues
  MOD_RES (10)..(10): Cyclobutyl-Ala
  MOD_RES (11)..(11): Alpha-Me S5-pentenyl-alanine olefin amino acid connected by an all-carbon crosslinker comprising one double bond
  C-term NH2
LTFAEFWAQAASAA

SEQ ID NO: 1050 - protein, 14 aa, Artificial Sequence
  Description of Artificial Sequence: Synthetic peptide
  N-term Ac
  MOD_RES (4)..(4): Alpha-Me R8-octenyl-alanine olefin amino acid connected by an all-carbon crosslinker comprising one double bond
  misc_feature (4)..(11): Crosslink between residues
  MOD_RES (10)..(10): Cyclobutyl-Ala
  MOD_RES (11)..(11): Alpha-Me S5-pentenyl-alanine olefin amino acid connected by an all-carbon crosslinker comprising one double bond
  C-term NH2
LTAAEYWAQAASAA

SEQ ID NO: 1051 - protein, 14 aa, Artificial Sequence
  Description of Artificial Sequence: Synthetic peptide
  N-term Ac
  MOD_RES (4)..(4): Alpha-Me R8-octenyl-alanine olefin amino acid connected by an all-carbon crosslinker comprising one double bond
  misc_feature (4)..(11): Crosslink between residues
  MOD_RES (10)..(10): Cyclobutyl-Ala
  MOD_RES (11)..(11): Alpha-Me S5-pentenyl-alanine olefin amino acid connected by an all-carbon crosslinker comprising one double bond
  C-term NH2
LTFAEYAAQAASAA

SEQ ID NO: 1052 - protein, 14 aa, Artificial Sequence
  Description of Artificial Sequence: Synthetic peptide
  N-term Ac
  MOD_RES (4)..(4): Alpha-Me R8-octenyl-alanine olefin amino acid connected by an all-carbon crosslinker comprising one double bond
  misc_feature (4)..(11): Crosslink between residues
  MOD_RES (7)..(7): 2-Naphthalanine
  MOD_RES (10)..(10): Cyclobutyl-Ala
  MOD_RES (11)..(11): Alpha-Me S5-pentenyl-alanine olefin amino acid connected by an all-carbon crosslinker comprising one double bond
  C-term NH2
LTFAEYAAQAASAA

SEQ ID NO: 1053 - protein, 14 aa, Artificial Sequence
  Description of Artificial Sequence: Synthetic peptide
  N-term Ac
  MOD_RES (4)..(4): Alpha-Me R8-octenyl-alanine olefin amino acid connected by an all-carbon crosslinker comprising one double bond
  misc_feature (4)..(11): Crosslink between residues
  MOD_RES (10)..(10): Cyclobutyl-Ala
  MOD_RES (11)..(11): Alpha-Me S5-pentenyl-alanine olefin amino acid connected by an all-carbon crosslinker comprising one double bond
  C-term NH2
LTFAAYWAQAASAA

SEQ ID NO: 1054 - protein, 14 aa, Artificial Sequence
  Description of Artificial Sequence: Synthetic peptide
  N-term Ac
  MOD_RES (4)..(4): Alpha-Me R8-octenyl-alanine olefin amino acid connected by an all-carbon crosslinker comprising one double bond
  misc_feature (4)..(11): Crosslink between residues
  MOD_RES (10)..(10): Cyclobutyl-Ala
  MOD_RES (11)..(11): Alpha-Me S5-pentenyl-alanine olefin amino acid connected by an all-carbon crosslinker comprising one double bond
  C-term NH2
LTFAEYWAQAASAF

SEQ ID NO: 1055 - protein, 15 aa, Artificial Sequence
  Description of Artificial Sequence: Synthetic peptide
  N-term Ac
  MOD_RES (4)..(4): Alpha-Me R8-octenyl-alanine olefin amino acid connected by an all-carbon crosslinker comprising one double bond
  misc_feature (4)..(11): Crosslink between residues
  MOD_RES (10)..(10): Cyclobutyl-Ala
  MOD_RES (11)..(11): Alpha-Me S5-pentenyl-alanine olefin amino acid connected by an all-carbon crosslinker comprising one double bond
  MOD_RES (15)..(15): D-amino acid
  C-term NH2
LTFAEYWAQAASAFA

SEQ ID NO: 1056 - protein, 14 aa, Artificial Sequence
  Description of Artificial Sequence: Synthetic peptide
  N-term Ac
  MOD_RES (4)..(4): Alpha-Me R8-octenyl-alanine olefin amino acid connected by an all-carbon crosslinker comprising one double bond
  misc_feature (4)..(11): Crosslink between residues
  MOD_RES (10)..(10): Cyclobutyl-Ala
  MOD_RES (11)..(11): Alpha-Me S5-pentenyl-alanine olefin amino acid connected by an all-carbon crosslinker comprising one double bond
  C-term NH2
LTFAAYWAQAASAF

SEQ ID NO: 1057 - protein, 14 aa, Artificial Sequence
  Description of Artificial Sequence: Synthetic peptide
  N-term Ac
  MOD_RES (3)..(3): 3,4-difluoro Phe
  MOD_RES (4)..(4): Alpha-Me R8-octenyl-alanine olefin amino acid connected by an all-carbon crosslinker comprising one double bond
  misc_feature (4)..(11): Crosslink between residues
  MOD_RES (10)..(10): Cyclobutyl-Ala
  MOD_RES (11)..(11): Alpha-Me S5-pentenyl-alanine olefin amino acid connected by an all-carbon crosslinker comprising one double bond
  C-term NH2
LTFAAYWAQAASAF

SEQ ID NO: 1058 - protein, 14 aa, Artificial Sequence
  Description of Artificial Sequence: Synthetic peptide
  N-term Ac
  MOD_RES (4)..(4): Alpha-Me R8-octenyl-alanine olefin amino acid connected by an all-carbon crosslinker comprising one double bond
  misc_feature (4)..(11): Crosslink between residues
  MOD_RES (6)..(6): 4-carboxy Phe
  MOD_RES (10)..(10): Cyclobutyl-Ala
  MOD_RES (11)..(11): Alpha-Me S5-pentenyl-alanine olefin amino acid connected by an all-carbon crosslinker comprising one double bond
  C-term NH2
LTFAAFWAQAASAF

SEQ ID NO: 1059 - protein, 14 aa, Artificial Sequence
  Description of Artificial Sequence: Synthetic peptide
  N-term Ac
  MOD_RES (4)..(4): Alpha-Me R8-octenyl-alanine olefin amino acid connected by an all-carbon crosslinker comprising one double bond
  misc_feature (4)..(11): Crosslink between residues
  MOD_RES (7)..(7): 6cl-Trp
  MOD_RES (10)..(10): Cyclobutyl-Ala
  MOD_RES (11)..(11): Alpha-Me S5-pentenyl-alanine olefin amino acid connected by an all-carbon crosslinker comprising one double bond
  C-term NH2
LTFAEYWAQAASAF

SEQ ID NO: 1060 - protein, 14 aa, Artificial Sequence
  Description of Artificial Sequence: Synthetic peptide
  N-term Ac
  MOD_RES (4)..(4): Alpha-Me R8-octenyl-alanine olefin amino acid connected by an all-carbon crosslinker comprising one double bond
  misc_feature (4)..(11): Crosslink between residues
  MOD_RES (10)..(10): Cyclobutyl-Ala
  MOD_RES (11)..(11): Alpha-Me S5-pentenyl-alanine olefin amino acid connected by an all-carbon crosslinker comprising one double bond
  C-term NH2
LTFAAYWSQAASAF

SEQ ID NO: 1061 - protein, 14 aa, Artificial Sequence
  Description of Artificial Sequence: Synthetic peptide
  N-term Ac
  MOD_RES (4)..(4): Alpha-Me R8-octenyl-alanine olefin amino acid connected by an all-carbon crosslinker comprising one double bond
  misc_feature (4)..(11): Crosslink between residues
  MOD_RES (10)..(10): Cyclobutyl-Ala
  MOD_RES (11)..(11): Alpha-Me S5-pentenyl-alanine olefin amino acid connected by an all-carbon crosslinker comprising one double bond
  C-term NH2
LTFAAYWWQAASAF

SEQ ID NO: 1062 - protein, 15 aa, Artificial Sequence
  Description of Artificial Sequence: Synthetic peptide
  N-term Ac
  MOD_RES (4)..(4): Alpha-Me R8-octenyl-alanine olefin amino acid connected by an all-carbon crosslinker comprising one double bond
  misc_feature (4)..(11): Crosslink between residues
  MOD_RES (10)..(10): Cyclobutyl-Ala
  MOD_RES (11)..(11): Alpha-Me S5-pentenyl-alanine olefin amino acid connected by an all-carbon crosslinker comprising one double bond
  MOD_RES (15)..(15): D-amino acid
  C-term NH2
LTFAAYWAQAAAAIA

SEQ ID NO: 1063 - protein, 15 aa, Artificial Sequence
  Description of Artificial Sequence: Synthetic peptide
  N-term Ac
  MOD_RES (3)..(3): 3,4-difluoro Phe
  MOD_RES (4)..(4): Alpha-Me R8-octenyl-alanine olefin amino acid connected by an all-carbon crosslinker comprising one double bond
  misc_feature (4)..(11): Crosslink between residues
  MOD_RES (10)..(10): Cyclobutyl-Ala
  MOD_RES (11)..(11): Alpha-Me S5-pentenyl-alanine olefin amino acid connected by an all-carbon crosslinker comprising one double bond
  MOD_RES (15)..(15): D-amino acid
  C-term NH2
LTFAAYWAQAAAAIA

SEQ ID NO: 1064 - protein, 15 aa, Artificial Sequence
  Description of Artificial Sequence: Synthetic peptide
  N-term Ac
  MOD_RES (4)..(4): Alpha-Me R8-octenyl-alanine olefin amino acid connected by an all-carbon crosslinker comprising one double bond
  misc_feature (4)..(11): Crosslink between residues
  MOD_RES (7)..(7): 6cl-Trp
  MOD_RES (10)..(10): Cyclobutyl-Ala
  MOD_RES (11)..(11): Alpha-Me S5-pentenyl-alanine olefin amino acid connected by an all-carbon crosslinker comprising one double bond
  MOD_RES (15)..(15): D-amino acid
  C-term NH2
LTFAAYWAQAAAAIA

SEQ ID NO: 1065 - protein, 15 aa, Artificial Sequence
  Description of Artificial Sequence: Synthetic peptide
  N-term Ac
  MOD_RES (4)..(4): Alpha-Me R8-octenyl-alanine olefin amino acid connected by an all-carbon crosslinker comprising one double bond
  misc_feature (4)..(11): Crosslink between residues
  MOD_RES (6)..(6): 4-carboxy Phe
  MOD_RES (10)..(10): Cyclobutyl-Ala
  MOD_RES (11)..(11): Alpha-Me S5-pentenyl-alanine olefin amino acid connected by an all-carbon crosslinker comprising one double bond
  MOD_RES (15)..(15): D-amino acid
  C-term NH2
LTFAAFWAQAAAAIA

SEQ ID NO: 1066 - protein, 15 aa, Artificial Sequence
  Description of Artificial Sequence: Synthetic peptide
  N-term Ac
  MOD_RES (4)..(4): Alpha-Me R8-octenyl-alanine olefin amino acid connected by an all-carbon crosslinker comprising one double bond
  misc_feature (4)..(11): Crosslink between residues
  MOD_RES (10)..(10): Cyclobutyl-Ala
  MOD_RES (11)..(11): Alpha-Me S5-pentenyl-alanine olefin amino acid connected by an all-carbon crosslinker comprising one double bond
  MOD_RES (15)..(15): D-amino acid
  C-term NH2
LTFAEYWAQAAAAFA

SEQ ID NO: 1067 - protein, 15 aa, Artificial Sequence
  Description of Artificial Sequence: Synthetic peptide
  N-term Ac
  MOD_RES (4)..(4): Alpha-Me R8-octenyl-alanine olefin amino acid connected by an all-carbon crosslinker comprising one double bond
  misc_feature (4)..(11): Crosslink between residues
  MOD_RES (10)..(10): Cyclobutyl-Ala
  MOD_RES (11)..(11): Alpha-Me S5-pentenyl-alanine olefin amino acid connected by an all-carbon crosslinker comprising one double bond
  MOD_RES (15)..(15): D-amino acid
  C-term NH2
LTFAEYWAQAAAAFA

SEQ ID NO: 1068 - protein, 15 aa, Artificial Sequence
  Description of Artificial Sequence: Synthetic peptide
  N-term Ac
  MOD_RES (4)..(4): Alpha-Me R8-octenyl-alanine olefin amino acid connected by an all-carbon crosslinker comprising one double bond
  misc_feature (4)..(11): Crosslink between residues
  MOD_RES (10)..(10): Cyclobutyl-Ala
  MOD_RES (11)..(11): Alpha-Me S5-pentenyl-alanine olefin amino acid connected by an all-carbon crosslinker comprising one double bond
  MOD_RES (14)..(14): Norleucine
  MOD_RES (15)..(15): D-amino acid
  C-term NH2
ETFAAYWAQAAAWLA

SEQ ID NO: 1069 - protein, 15 aa, Artificial Sequence
  Description of Artificial Sequence: Synthetic peptide
  N-term Ac
  MOD_RES (4)..(4): Alpha-Me R8-octenyl-alanine olefin amino acid connected by an all-carbon crosslinker comprising one double bond
  misc_feature (4)..(11): Crosslink between residues
  MOD_RES (10)..(10): Cyclobutyl-Ala
  MOD_RES (11)..(11): Alpha-Me S5-pentenyl-alanine olefin amino acid connected by an all-carbon crosslinker comprising one double bond
  MOD_RES (14)..(14): Norleucine
  MOD_RES (15)..(15): D-amino acid
  C-term NH2
LTFAEYWAQAAAWLA

SEQ ID NO: 1070 - protein, 15 aa, Artificial Sequence
  Description of Artificial Sequence: Synthetic peptide
  N-term Ac
  MOD_RES (4)..(4): Alpha-Me R8-octenyl-alanine olefin amino acid connected by an all-carbon crosslinker comprising one double bond
  misc_feature (4)..(11): Crosslink between residues
  MOD_RES (10)..(10): Cyclobutyl-Ala
  MOD_RES (11)..(11): Alpha-Me S5-pentenyl-alanine olefin amino acid connected by an all-carbon crosslinker comprising one double bond
  MOD_RES (14)..(14): Norleucine
  MOD_RES (15)..(15): D-amino acid
  C-term NH2
ETFAEYWAQAAAWLA

SEQ ID NO: 1071 - protein, 15 aa, Artificial Sequence
  Description of Artificial Sequence: Synthetic peptide
  N-term Ac
  MOD_RES (4)..(4): Alpha-Me R8-octenyl-alanine olefin amino acid connected by an all-carbon crosslinker comprising one double bond
  misc_feature (4)..(11): Crosslink between residues
  MOD_RES (10)..(10): Cyclobutyl-Ala
  MOD_RES (11)..(11): Alpha-Me S5-pentenyl-alanine olefin amino acid connected by an all-carbon crosslinker comprising one double bond
  MOD_RES (14)..(14): Norleucine
  MOD_RES (15)..(15): D-amino acid
  C-term NH2
ETFAEYWAQAAAWLA

SEQ ID NO: 1072 - protein, 15 aa, Artificial Sequence
  Description of Artificial Sequence: Synthetic peptide
  N-term Ac
  MOD_RES (4)..(4): Alpha-Me R8-octenyl-alanine olefin amino acid connected by an all-carbon crosslinker comprising one double bond
  misc_feature (4)..(11): Crosslink between residues
  MOD_RES (10)..(10): Cyclobutyl-Ala
  MOD_RES (11)..(11): Alpha-Me S5-pentenyl-alanine olefin amino acid connected by an all-carbon crosslinker comprising one double bond
  MOD_RES (15)..(15): D-amino acid
  C-term NH2
LTFAAYWAQAASAFA

SEQ ID NO: 1073 - protein, 15 aa, Artificial Sequence
  Description of Artificial Sequence: Synthetic peptide
  N-term Ac
  MOD_RES (4)..(4): Alpha-Me R8-octenyl-alanine olefin amino acid connected by an all-carbon crosslinker comprising one double bond
  misc_feature (4)..(11): Crosslink between residues
  MOD_RES (10)..(10): Cyclobutyl-Ala
  MOD_RES (11)..(11): Alpha-Me S5-pentenyl-alanine olefin amino acid connected by an all-carbon crosslinker comprising one double bond
  MOD_RES (15)..(15): D-amino acid
  C-term NH2
LTFAAYWAQAASAFA

SEQ ID NO: 1074 - protein, 15 aa, Artificial Sequence
  Description of Artificial Sequence: Synthetic peptide
  N-term Ac
  MOD_RES (4)..(4): Alpha-Me R8-octenyl-alanine olefin amino acid connected by an all-carbon crosslinker comprising one double bond
  misc_feature (4)..(11): Crosslink between residues
  MOD_RES (11)..(11): Alpha-Me S5-pentenyl-alanine olefin amino acid connected by an all-carbon crosslinker comprising one double bond
  MOD_RES (14)..(14): Norleucine
  MOD_RES (15)..(15): D-amino acid
  C-term NH2
ETFAAYWAQLAAWLA

SEQ ID NO: 1075 - protein, 15 aa, Artificial Sequence
  Description of Artificial Sequence: Synthetic peptide
  N-term Ac
  MOD_RES (4)..(4): Alpha-Me R8-octenyl-alanine olefin amino acid connected by an all-carbon crosslinker comprising one double bond
  misc_feature (4)..(11): Crosslink between residues
  MOD_RES (11)..(11): Alpha-Me S5-pentenyl-alanine olefin amino acid connected by an all-carbon crosslinker comprising one double bond
  MOD_RES (14)..(14): Norleucine
  MOD_RES (15)..(15): D-amino acid
  C-term NH2
LTFAEYWAQLAAWLA

SEQ ID NO: 1076 - protein, 15 aa, Artificial Sequence
  Description of Artificial Sequence: Synthetic peptide
  N-term Ac
  MOD_RES (4)..(4): Alpha-Me R8-octenyl-alanine olefin amino acid connected by an all-carbon crosslinker comprising one double bond
  misc_feature (4)..(11): Crosslink between residues
  MOD_RES (11)..(11): Alpha-Me S5-pentenyl-alanine olefin amino acid connected by an all-carbon crosslinker comprising one double bond
  MOD_RES (14)..(14): Norleucine
  MOD_RES (15)..(15): D-amino acid
  C-term NH2
ETFAEYWAQLAAWLA

SEQ ID NO: 1077 - protein, 14 aa, Artificial Sequence
  Description of Artificial Sequence: Synthetic peptide
  N-term Dmaac
  MOD_RES (4)..(4): Alpha-Me R8-octenyl-alanine olefin amino acid connected by an all-carbon crosslinker comprising one double bond
  misc_feature (4)..(11): Crosslink between residues
  MOD_RES (10)..(10): hLeu
  MOD_RES (11)..(11): Alpha-Me S5-pentenyl-alanine olefin amino acid connected by an all-carbon crosslinker comprising one double bond
  C-term NH2
LTFAEYWAQLASAA

SEQ ID NO: 1078 - protein, 14 aa, Artificial Sequence
  Description of Artificial Sequence: Synthetic peptide
  N-term Hexac
  MOD_RES (4)..(4): Alpha-Me R8-octenyl-alanine olefin amino acid connected by an all-carbon crosslinker comprising one double bond
  misc_feature (4)..(11): Crosslink between residues
  MOD_RES (10)..(10): hLeu
  MOD_RES (11)..(11): Alpha-Me S5-pentenyl-alanine olefin amino acid connected by an all-carbon crosslinker comprising one double bond
  C-term NH2
LTFAEYWAQLASAA

SEQ ID NO: 1079 - protein, 14 aa, Artificial Sequence
  Description of Artificial Sequence: Synthetic peptide
  N-term Napac
  MOD_RES (4)..(4): Alpha-Me R8-octenyl-alanine olefin amino acid connected by an all-carbon crosslinker comprising one double bond
  misc_feature (4)..(11): Crosslink between residues
  MOD_RES (10)..(10): hLeu
  MOD_RES (11)..(11): Alpha-Me S5-pentenyl-alanine olefin amino acid connected by an all-carbon crosslinker comprising one double bond
  C-term NH2
LTFAEYWAQLASAA

SEQ ID NO: 1080 - protein, 14 aa, Artificial Sequence
  Description of Artificial Sequence: Synthetic peptide
  N-term Decac
  MOD_RES (4)..(4): Alpha-Me R8-octenyl-alanine olefin amino acid connected by an all-carbon crosslinker comprising one double bond
  misc_feature (4)..(11): Crosslink between residues
  MOD_RES (10)..(10): hLeu
  MOD_RES (11)..(11): Alpha-Me S5-pentenyl-alanine olefin amino acid connected by an all-carbon crosslinker comprising one double bond
  C-term NH2
LTFAEYWAQLASAA

SEQ ID NO: 1081 - protein, 14 aa, Artificial Sequence
  Description of Artificial Sequence: Synthetic peptide
  N-term Admac
  MOD_RES (4)..(4): Alpha-Me R8-octenyl-alanine olefin amino acid connected by an all-carbon crosslinker comprising one double bond
  misc_feature (4)..(11): Crosslink between residues
  MOD_RES (10)..(10): hLeu
  MOD_RES (11)..(11): Alpha-Me S5-pentenyl-alanine olefin amino acid connected by an all-carbon crosslinker comprising one double bond
  C-term NH2
LTFAEYWAQLASAA

SEQ ID NO: 1082 - protein, 14 aa, Artificial Sequence
  Description of Artificial Sequence: Synthetic peptide
  N-term Tmac
  MOD_RES (4)..(4): Alpha-Me R8-octenyl-alanine olefin amino acid connected by an all-carbon crosslinker comprising one double bond
  misc_feature (4)..(11): Crosslink between residues
  MOD_RES (10)..(10): hLeu
  MOD_RES (11)..(11): Alpha-Me S5-pentenyl-alanine olefin amino acid connected by an all-carbon crosslinker comprising one double bond
  C-term NH2
LTFAEYWAQLASAA

SEQ ID NO: 1083 - protein, 14 aa, Artificial Sequence
  Description of Artificial Sequence: Synthetic peptide
  N-term Pam
  MOD_RES (4)..(4): Alpha-Me R8-octenyl-alanine olefin amino acid connected by an all-carbon crosslinker comprising one double bond
  misc_feature (4)..(11): Crosslink between residues
  MOD_RES (10)..(10): hLeu
  MOD_RES (11)..(11): Alpha-Me S5-pentenyl-alanine olefin amino acid connected by an all-carbon crosslinker comprising one double bond
  C-term NH2
LTFAEYWAQLASAA

SEQ ID NO: 1084 - protein, 15 aa, Artificial Sequence
  Description of Artificial Sequence: Synthetic peptide
  N-term Ac
  MOD_RES (4)..(4): Alpha-Me R8-octenyl-alanine olefin amino acid connected by an all-carbon crosslinker comprising one double bond
  misc_feature (4)..(11): Crosslink between residues
  MOD_RES (10)..(10): Cyclobutyl-Ala
  MOD_RES (11)..(11): Alpha-Me S5-pentenyl-alanine olefin amino acid connected by an all-carbon crosslinker comprising one double bond
  MOD_RES (14)..(14): Norleucine
  C-term NH2
LTFAAYWAQAAAALA

SEQ ID NO: 1085 - protein, 15 aa, Artificial Sequence
  Description of Artificial Sequence: Synthetic peptide
  N-term Ac
  MOD_RES (3)..(3): 3,4-difluoro Phe
  MOD_RES (4)..(4): Alpha-Me R8-octenyl-alanine olefin amino acid connected by an all-carbon crosslinker comprising one double bond
  misc_feature (4)..(11): Crosslink between residues
  MOD_RES (10)..(10): Cyclobutyl-Ala
  MOD_RES (11)..(11): Alpha-Me S5-pentenyl-alanine olefin amino acid connected by an all-carbon crosslinker comprising one double bond
  MOD_RES (15)..(15): D-amino acid
  C-term NH2
LTFAEYWAQAAAAIA

SEQ ID NO: 1086 - protein, 14 aa, Artificial Sequence
  Description of Artificial Sequence: Synthetic peptide
  N-term Ac
  MOD_RES (3)..(3): 3,4-difluoro Phe
  MOD_RES (4)..(4): Alpha-Me R8-octenyl-alanine olefin amino acid connected by an all-carbon crosslinker comprising one double bond
  misc_feature (4)..(11): Crosslink between residues
  MOD_RES (10)..(10): Cyclobutyl-Ala
  MOD_RES (11)..(11): Alpha-Me S5-pentenyl-alanine olefin amino acid connected by an all-carbon crosslinker comprising one double bond
  C-term NH2
LTFAEYWAQAASAA

SEQ ID NO: 1087 - protein, 14 aa, Artificial Sequence
  Description of Artificial Sequence: Synthetic peptide
  N-term Ac
  MOD_RES (3)..(3): 3,4-difluoro Phe
  MOD_RES (4)..(4): Alpha-Me R8-octenyl-alanine olefin amino acid connected by an all-carbon crosslinker comprising one double bond
  misc_feature (4)..(11): Crosslink between residues
  MOD_RES (10)..(10): Cyclobutyl-Ala
  MOD_RES (11)..(11): Alpha-Me S5-pentenyl-alanine olefin amino acid connected by an all-carbon crosslinker comprising one double bond
  C-term NH2
LTFAEYWAQAASAA

SEQ ID NO: 1088 - protein, 14 aa, Artificial Sequence
  Description of Artificial Sequence: Synthetic peptide
  N-term Ac
  MOD_RES (4)..(4): Alpha-Me R8-octenyl-alanine olefin amino acid connected by an all-carbon crosslinker comprising one double bond
  misc_feature (4)..(11): Crosslink between residues
  MOD_RES (6)..(6): 4-carboxy Phe
  MOD_RES (10)..(10): Cyclobutyl-Ala
  MOD_RES (11)..(11): Alpha-Me S5-pentenyl-alanine olefin amino acid connected by an all-carbon crosslinker comprising one double bond
  C-term NH2
LTFAEFWAQAASAA

SEQ ID NO: 1089 - protein, 14 aa, Artificial Sequence
  Description of Artificial Sequence: Synthetic peptide
  N-term Ac
  MOD_RES (4)..(4): Alpha-Me R8-octenyl-alanine olefin amino acid connected by an all-carbon crosslinker comprising one double bond
  misc_feature (4)..(11): Crosslink between residues
  MOD_RES (6)..(6): 4-carboxy Phe
  MOD_RES (10)..(10): Cyclobutyl-Ala
  MOD_RES (11)..(11): Alpha-Me S5-pentenyl-alanine olefin amino acid connected by an all-carbon crosslinker comprising one double bond
  C-term NH2
LTFAEFWAQAASAA

SEQ ID NO: 1090 - protein, 14 aa, Artificial Sequence
  Description of Artificial Sequence: Synthetic peptide
  N-term Ac
  MOD_RES (4)..(4): Alpha-Me R8-octenyl-alanine olefin amino acid connected by an all-carbon crosslinker comprising one double bond
  misc_feature (4)..(11): Crosslink between residues
  MOD_RES (10)..(10): Cyclobutyl-Ala
  MOD_RES (11)..(11): Alpha-Me S5-pentenyl-alanine olefin amino acid connected by an all-carbon crosslinker comprising one double bond
  C-term NH2
LTFAEYWSQAASAA

SEQ ID NO: 1091 - protein, 14 aa, Artificial Sequence
  Description of Artificial Sequence: Synthetic peptide
  N-term Ac
  MOD_RES (4)..(4): Alpha-Me R8-octenyl-alanine olefin amino acid connected by an all-carbon crosslinker comprising one double bond
  misc_feature (4)..(11): Crosslink between residues
  MOD_RES (10)..(10): Cyclobutyl-Ala
  MOD_RES (11)..(11): Alpha-Me S5-pentenyl-alanine olefin amino acid connected by an all-carbon crosslinker comprising one double bond
  C-term NH2
LTFAEYWSQAASAA

SEQ ID NO: 1092 - protein, 14 aa, Artificial Sequence
  Description of Artificial Sequence: Synthetic peptide
  N-term Ac
  MOD_RES (4)..(4): Alpha-Me R8-octenyl-alanine olefin amino acid connected by an all-carbon crosslinker comprising one double bond
  misc_feature (4)..(11): Crosslink between residues
  MOD_RES (10)..(10): hLeu
  MOD_RES (11)..(11): Alpha-Me S5-pentenyl-alanine olefin amino acid connected by an all-carbon crosslinker comprising one double bond
  C-term NH2
LTFAEYWAQLASAA

SEQ ID NO: 1093 - protein, 14 aa, Artificial Sequence
  Description of Artificial Sequence: Synthetic peptide
  N-term Ac
  MOD_RES (4)..(4): Alpha-Me R8-octenyl-alanine olefin amino acid connected by an all-carbon crosslinker comprising one double bond
  misc_feature (4)..(11): Crosslink between residues
  MOD_RES (10)..(10): hLeu
  MOD_RES (11)..(11): Alpha-Me S5-pentenyl-alanine olefin amino acid connected by an all-carbon crosslinker comprising one double bond
  C-term NH2
LTFAAYWAQLASAF

SEQ ID NO: 1094 - protein, 14 aa, Artificial Sequence
  Description of Artificial Sequence: Synthetic peptide
  N-term Ac
  MOD_RES (4)..(4): Alpha-Me R8-octenyl-alanine olefin amino acid connected by an all-carbon crosslinker comprising one double bond
  misc_feature (4)..(11): Crosslink between residues
  MOD_RES (10)..(10): hLeu
  MOD_RES (11)..(11): Alpha-Me S5-pentenyl-alanine olefin amino acid connected by an all-carbon crosslinker comprising one double bond
  C-term NH2
LTFAAYWAQLASAF

SEQ ID NO: 1095 - protein, 14 aa, Artificial Sequence
  Description of Artificial Sequence: Synthetic peptide
  N-term Ac
  MOD_RES (3)..(3): 3,4-difluoro Phe
  MOD_RES (4)..(4): Alpha-Me R8-octenyl-alanine olefin amino acid connected by an all-carbon crosslinker comprising one double bond
  misc_feature (4)..(11): Crosslink between residues
  MOD_RES (10)..(10): hLeu
  MOD_RES (11)..(11): Alpha-Me S5-pentenyl-alanine olefin amino acid connected by an all-carbon crosslinker comprising one double bond
  C-term NH2
LTFAAYWAQLASAA

SEQ ID NO: 1096 - protein, 14 aa, Artificial Sequence
  Description of Artificial Sequence: Synthetic peptide
  N-term Ac
  MOD_RES (3)..(3): 3,4-difluoro Phe
  MOD_RES (4)..(4): Alpha-Me R8-octenyl-alanine olefin amino acid connected by an all-carbon crosslinker comprising one double bond
  misc_feature (4)..(11): Crosslink between residues
  MOD_RES (10)..(10): hLeu
  MOD_RES (11)..(11): Alpha-Me S5-pentenyl-alanine olefin amino acid connected by an all-carbon crosslinker comprising one double bond
  C-term NH2
LTFAAYWAQLASAA

SEQ ID NO: 1097 - protein, 14 aa, Artificial Sequence
  Description of Artificial Sequence: Synthetic peptide
  N-term Ac
  MOD_RES (4)..(4): Alpha-Me R8-octenyl-alanine olefin amino acid connected by an all-carbon crosslinker comprising one double bond
  misc_feature (4)..(11): Crosslink between residues
  MOD_RES (6)..(6): 4-carboxy Phe
  MOD_RES (10)..(10): hLeu
  MOD_RES (11)..(11): Alpha-Me S5-pentenyl-alanine olefin amino acid connected by an all-carbon crosslinker comprising one double bond
  C-term NH2
LTFAAFWAQLASAA

SEQ ID NO: 1098 - protein, 14 aa, Artificial Sequence
  Description of Artificial Sequence: Synthetic peptide
  N-term Ac
  MOD_RES (4)..(4): Alpha-Me R8-octenyl-alanine olefin amino acid connected by an all-carbon crosslinker comprising one double bond
  misc_feature (4)..(11): Crosslink between residues
  MOD_RES (6)..(6): 4-carboxy Phe
  MOD_RES (10)..(10): hLeu
  MOD_RES (11)..(11): Alpha-Me S5-pentenyl-alanine olefin amino acid connected by an all-carbon crosslinker comprising one double bond
  C-term NH2
LTFAAFWAQLASAA

SEQ ID NO: 1099 - protein, 14 aa, Artificial Sequence
  Description of Artificial Sequence: Synthetic peptide
  N-term Ac
  MOD_RES (4)..(4): Alpha-Me R8-octenyl-alanine olefin amino acid connected by an all-carbon crosslinker comprising one double bond
  misc_feature (4)..(11): Crosslink between residues
  MOD_RES (10)..(10): hLeu
  MOD_RES (11)..(11): Alpha-Me S5-pentenyl-alanine olefin amino acid connected by an all-carbon crosslinker comprising one double bond
  C-term NH2
LTFAAYWSQLASAA

SEQ ID NO: 1100 - protein, 14 aa, Artificial Sequence
  Description of Artificial Sequence: Synthetic peptide
  N-term Ac
  MOD_RES (4)..(4): Alpha-Me R8-octenyl-alanine olefin amino acid connected by an all-carbon crosslinker comprising one double bond
  misc_feature (4)..(11): Crosslink between residues
  MOD_RES (10)..(10): hLeu
  MOD_RES (11)..(11): Alpha-Me S5-pentenyl-alanine olefin amino acid connected by an all-carbon crosslinker comprising one double bond
  C-term NH2
LTFAAYWSQLASAA

SEQ ID NO: 1101 - protein, 15 aa, Artificial Sequence
  Description of Artificial Sequence: Synthetic peptide
  N-term Ac
  MOD_RES (4)..(4): Alpha-Me R8-octenyl-alanine olefin amino acid connected by an all-carbon crosslinker comprising one double bond
  misc_feature (4)..(11): Crosslink between residues
  MOD_RES (11)..(11): Alpha-Me S5-pentenyl-alanine olefin amino acid connected by an all-carbon crosslinker comprising one double bond
  MOD_RES (14)..(14): Norleucine
  C-term NH2
LTFAEYWAQLAAALA

SEQ ID NO: 1102 - protein, 15 aa, Artificial Sequence
  Description of Artificial Sequence: Synthetic peptide
  N-term Ac
  MOD_RES (3)..(3): 3,4-difluoro Phe
  MOD_RES (4)..(4): Alpha-Me R8-octenyl-alanine olefin amino acid connected by an all-carbon crosslinker comprising one double bond
  misc_feature (4)..(11): Crosslink between residues
  MOD_RES (11)..(11): Alpha-Me S5-pentenyl-alanine olefin amino acid connected by an all-carbon crosslinker comprising one double bond
  MOD_RES (14)..(14): Norleucine
  C-term NH2
LTFAAYWAQLAAALA

SEQ ID NO: 1103 - protein, 15 aa, Artificial Sequence
  Description of Artificial Sequence: Synthetic peptide
  N-term Ac
  MOD_RES (4)..(4): Alpha-Me R8-octenyl-alanine olefin amino acid connected by an all-carbon crosslinker comprising one double bond
  misc_feature (4)..(11): Crosslink between residues
  MOD_RES (6)..(6): 4-carboxy Phe
  MOD_RES (11)..(11): Alpha-Me S5-pentenyl-alanine olefin amino acid connected by an all-carbon crosslinker comprising one double bond
  MOD_RES (14)..(14): Norleucine
  C-term NH2
LTFAAFWAQLAAALA

SEQ ID NO: 1104 - protein, 15 aa, Artificial Sequence
  Description of Artificial Sequence: Synthetic peptide
  N-term Ac
  MOD_RES (4)..(4): Alpha-Me R8-octenyl-alanine olefin amino acid connected by an all-carbon crosslinker comprising one double bond
  misc_feature (4)..(11): Crosslink between residues
  MOD_RES (11)..(11): Alpha-Me S5-pentenyl-alanine olefin amino acid connected by an all-carbon crosslinker comprising one double bond
  MOD_RES (14)..(14): Norleucine
  C-term NH2
LTFAAYWSQLAAALA

SEQ ID NO: 1105 - protein, 15 aa, Artificial Sequence
  Description of Artificial Sequence: Synthetic peptide
  N-term Ac
  MOD_RES (3)..(3): 3,4-difluoro Phe
  MOD_RES (4)..(4): Alpha-Me R8-octenyl-alanine olefin amino acid connected by an all-carbon crosslinker comprising one double bond
  misc_feature (4)..(11): Crosslink between residues
  MOD_RES (10)..(10): hLeu
  MOD_RES (11)..(11): Alpha-Me S5-pentenyl-alanine olefin amino acid connected by an all-carbon crosslinker comprising one double bond
  MOD_RES (14)..(14): Norleucine
  C-term NH2
LTFAAYWAQLAAALA

SEQ ID NO: 1106 - protein, 15 aa, Artificial Sequence
  Description of Artificial Sequence: Synthetic peptide
  N-term Ac
  MOD_RES (3)..(3): 3,4-difluoro Phe
  MOD_RES (4)..(4): Alpha-Me R8-octenyl-alanine olefin amino acid connected by an all-carbon crosslinker comprising one double bond
  misc_feature (4)..(11): Crosslink between residues
  MOD_RES (10)..(10): hLeu
  MOD_RES (11)..(11): Alpha-Me S5-pentenyl-alanine olefin amino acid connected by an all-carbon crosslinker comprising one double bond
  MOD_RES (14)..(14): Norleucine
  C-term NH2
LTFAAYWAQLAAALA

SEQ ID NO: 1107 - protein, 15 aa, Artificial Sequence
  Description of Artificial Sequence: Synthetic peptide
  N-term Ac
  MOD_RES (4)..(4): Alpha-Me R8-octenyl-alanine olefin amino acid connected by an all-carbon crosslinker comprising one double bond
  misc_feature (4)..(11): Crosslink between residues
  MOD_RES (6)..(6): 4-carboxy Phe
  MOD_RES (10)..(10): hLeu
  MOD_RES (11)..(11): Alpha-Me S5-pentenyl-alanine olefin amino acid connected by an all-carbon crosslinker comprising one double bond
  MOD_RES (14)..(14): Norleucine
  C-term NH2
LTFAAFWAQLAAALA

SEQ ID NO: 1108 - protein, 15 aa, Artificial Sequence
  Description of Artificial Sequence: Synthetic peptide
  N-term Ac
  MOD_RES (4)..(4): Alpha-Me R8-octenyl-alanine olefin amino acid connected by an all-carbon crosslinker comprising one double bond
  misc_feature (4)..(11): Crosslink between residues
  MOD_RES (6)..(6): 4-carboxy Phe
  MOD_RES (10)..(10): hLeu
  MOD_RES (11)..(11): Alpha-Me S5-pentenyl-alanine olefin amino acid connected by an all-carbon crosslinker comprising one double bond
  MOD_RES (14)..(14): Norleucine
  C-term NH2
LTFAAFWAQLAAALA

SEQ ID NO: 1109 - protein, 15 aa, Artificial Sequence
  Description of Artificial Sequence: Synthetic peptide
  N-term Ac
  MOD_RES (4)..(4): Alpha-Me R8-octenyl-alanine olefin amino acid connected by an all-carbon crosslinker comprising one double bond
  misc_feature (4)..(11): Crosslink between residues
  MOD_RES (10)..(10): hLeu
  MOD_RES (11)..(11): Alpha-Me S5-pentenyl-alanine olefin amino acid connected by an all-carbon crosslinker comprising one double bond
  MOD_RES (14)..(14): Norleucine
  C-term NH2
LTFAAYWSQLAAALA

SEQ ID NO: 1110 - protein, 15 aa, Artificial Sequence
  Description of Artificial Sequence: Synthetic peptide
  N-term Ac
  MOD_RES (4)..(4): Alpha-Me R8-octenyl-alanine olefin amino acid connected by an all-carbon crosslinker comprising one double bond
  misc_feature (4)..(11): Crosslink between residues
  MOD_RES (10)..(10): hLeu
  MOD_RES (11)..(11): Alpha-Me S5-pentenyl-alanine olefin amino acid connected by an all-carbon crosslinker comprising one double bond
  MOD_RES (14)..(14): Norleucine
  C-term NH2
LTFAAYWSQLAAALA

SEQ ID NO: 1111 - protein, 16 aa, Artificial Sequence
  Description of Artificial Sequence: Synthetic peptide
  N-term Ac
  MOD_RES (4)..(4): Alpha-Me R8-octenyl-alanine olefin amino acid connected by an all-carbon crosslinker comprising one double bond
  misc_feature (4)..(11): Crosslink between residues
  MOD_RES (10)..(10): hLeu
  MOD_RES (11)..(11): Alpha-Me S5-pentenyl-alanine olefin amino acid connected by an all-carbon crosslinker comprising one double bond
  MOD_RES (16)..(16): D-amino acid
  C-term NH2
LTFAAYWAQLAAAAAA

SEQ ID NO: 1112 - protein, 16 aa, Artificial Sequence
  Description of Artificial Sequence: Synthetic peptide
  N-term Ac
  MOD_RES (4)..(4): Alpha-Me R8-octenyl-alanine olefin amino acid connected by an all-carbon crosslinker comprising one double bond
  misc_feature (4)..(11): Crosslink between residues
  MOD_RES (10)..(10): hLeu
  MOD_RES (11)..(11): Alpha-Me S5-pentenyl-alanine olefin amino acid connected by an all-carbon crosslinker comprising one double bond
  MOD_RES (16)..(16): D-amino acid
  C-term NH2
LTFAAYWAQLAAAAAA

SEQ ID NO: 1113 - protein, 17 aa, Artificial Sequence
  Description of Artificial Sequence: Synthetic peptide
  N-term Ac
  MOD_RES (4)..(4): Alpha-Me R8-octenyl-alanine olefin amino acid connected by an all-carbon crosslinker comprising one double bond
  misc_feature (4)..(11): Crosslink between residues
  MOD_RES (11)..(11): Alpha-Me S5-pentenyl-alanine olefin amino acid connected by an all-carbon crosslinker comprising one double bond
  MOD_RES (17)..(17): D-amino acid
  C-term NH2
LTFAAYWAQLAAAAAAA

SEQ ID NO: 1114 - protein, 18 aa, Artificial Sequence
  Description of Artificial Sequence: Synthetic peptide
  N-term Ac
  MOD_RES (4)..(4): Alpha-Me R8-octenyl-alanine olefin amino acid connected by an all-carbon crosslinker comprising one double bond
  misc_feature (4)..(11): Crosslink between residues
  MOD_RES (11)..(11): Alpha-Me S5-pentenyl-alanine olefin amino acid connected by an all-carbon crosslinker comprising one double bond
  MOD_RES (18)..(18): D-amino acid
  C-term NH2
LTFAAYWAQLAAAAAAAA

SEQ ID NO: 1115 - protein, 18 aa, Artificial Sequence
  Description of Artificial Sequence: Synthetic peptide
  N-term Ac
  MOD_RES (4)..(4): Alpha-Me R8-octenyl-alanine olefin amino acid connected by an all-carbon crosslinker comprising one double bond
  misc_feature (4)..(11): Crosslink between residues
  MOD_RES (11)..(11): Alpha-Me S5-pentenyl-alanine olefin amino acid connected by an all-carbon crosslinker comprising one double bond
  MOD_RES (18)..(18): D-amino acid
  C-term NH2
LTFAAYWAQLAAAAAAAA

SEQ ID NO: 1116 - protein, 15 aa, Artificial Sequence
  Description of Artificial Sequence: Synthetic peptide
  N-term Ac
  MOD_RES (4)..(4): Alpha-Me R8-octenyl-alanine olefin amino acid connected by an all-carbon crosslinker comprising one double bond
  misc_feature (4)..(11): Crosslink between residues
  MOD_RES (10)..(10): hLeu
  MOD_RES (11)..(11): Alpha-Me S5-pentenyl-alanine olefin amino acid connected by an all-carbon crosslinker comprising one double bond
  MOD_RES (14)..(14): Norleucine
  C-term NH2
LTFAEYWAQLAAALA

SEQ ID NO: 1117 - protein, 16 aa, Artificial Sequence
  Description of Artificial Sequence: Synthetic peptide
  N-term Ac
  MOD_RES (5)..(5): Alpha-Me R8-octenyl-alanine olefin amino acid connected by an all-carbon crosslinker comprising one double bond
  misc_feature (5)..(12): Crosslink between residues
  MOD_RES (12)..(12): Alpha-Me S5-pentenyl-alanine olefin amino acid connected by an all-carbon crosslinker comprising one double bond
  MOD_RES (15)..(15): Norleucine
  C-term NH2
AATFAAYWAQLAAALA

SEQ ID NO: 1118 - protein, 16 aa, Artificial Sequence
  Description of Artificial Sequence: Synthetic peptide
  N-term Ac
  MOD_RES (4)..(4): Alpha-Me R8-octenyl-alanine olefin amino acid connected by an all-carbon crosslinker comprising one double bond
  misc_feature (4)..(11): Crosslink between residues
  MOD_RES (11)..(11): Alpha-Me S5-pentenyl-alanine olefin amino acid connected by an all-carbon crosslinker comprising one double bond
  MOD_RES (14)..(14): Norleucine
  C-term NH2
LTFAAYWAQLAAALAA

SEQ ID NO: 1119 - protein, 17 aa, Artificial Sequence
  Description of Artificial Sequence: Synthetic peptide
  N-term Ac
  MOD_RES (5)..(5): Alpha-Me R8-octenyl-alanine olefin amino acid connected by an all-carbon crosslinker comprising one double bond
  misc_feature (5)..(12): Crosslink between residues
  MOD_RES (12)..(12): Alpha-Me S5-pentenyl-alanine olefin amino acid connected by an all-carbon crosslinker comprising one double bond
  MOD_RES (15)..(15): Norleucine
  C-term NH2
ALTFAAYWAQLAAALAA

SEQ ID NO: 1120 - protein, 16 aa, Artificial Sequence
  Description of Artificial Sequence: Synthetic peptide
  N-term Ac
  MOD_RES (4)..(4): Alpha-Me R8-octenyl-alanine olefin amino acid connected by an all-carbon crosslinker comprising one double bond
  misc_feature (4)..(11): Crosslink between residues
  MOD_RES (10)..(10): Cyclobutyl-Ala
  MOD_RES (11)..(11): Alpha-Me S5-pentenyl-alanine olefin amino acid connected by an all-carbon crosslinker comprising one double bond
  MOD_RES (14)..(14): Norleucine
  C-term NH2
LTFAAYWAQAAAALAA

SEQ ID NO: 1121 - protein, 16 aa, Artificial Sequence
  Description of Artificial Sequence: Synthetic peptide
  N-term Ac
  MOD_RES (4)..(4): Alpha-Me R8-octenyl-alanine olefin amino acid connected by an all-carbon crosslinker comprising one double bond
  misc_feature (4)..(11): Crosslink between residues
  MOD_RES (10)..(10): hLeu
  MOD_RES (11)..(11): Alpha-Me S5-pentenyl-alanine olefin amino acid connected by an all-carbon crosslinker comprising one double bond
  MOD_RES (14)..(14): Norleucine
  C-term NH2
LTFAAYWAQLAAALAA

SEQ ID NO: 1122 - protein, 15 aa, Artificial Sequence
  Description of Artificial Sequence: Synthetic peptide
  N-term Ac
  MOD_RES (4)..(4): Alpha-Me R8-octenyl-alanine olefin amino acid connected by an all-carbon crosslinker comprising one double bond
  misc_feature (4)..(11): Crosslink between residues
  MOD_RES (10)..(10): Cyclobutyl-Ala
  MOD_RES (11)..(11): Alpha-Me S5-pentenyl-alanine olefin amino acid connected by an all-carbon crosslinker comprising one double bond
  C-term NH2
LTFAEYWAQAASAAA

SEQ ID NO: 1123 - protein, 15 aa, Artificial Sequence
  Description of Artificial Sequence: Synthetic peptide
  N-term Ac
  MOD_RES (4)..(4): Alpha-Me R8-octenyl-alanine olefin amino acid connected by an all-carbon crosslinker comprising one double bond
  misc_feature (4)..(11): Crosslink between residues
  MOD_RES (10)..(10): Cyclobutyl-Ala
  MOD_RES (11)..(11): Alpha-Me S5-pentenyl-alanine olefin amino acid connected by an all-carbon crosslinker comprising one double bond
  C-term NH2
LTFAEYWAQAASAAA

SEQ ID NO: 1124 - protein, 16 aa, Artificial Sequence
  Description of Artificial Sequence: Synthetic peptide
  N-term Ac
  MOD_RES (4)..(4): Alpha-Me R8-octenyl-alanine olefin amino acid connected by an all-carbon crosslinker comprising one double bond
  misc_feature (4)..(11): Crosslink between residues
  MOD_RES (10)..(10): Cyclobutyl-Ala
  MOD_RES (11)..(11): Alpha-Me S5-pentenyl-alanine olefin amino acid connected by an all-carbon crosslinker comprising one double bond
  C-term NH2
LTFAEYWAQAASAAAA

SEQ ID NO: 1125 - protein, 16 aa, Artificial Sequence
  Description of Artificial Sequence: Synthetic peptide
  N-term Ac
  MOD_RES (4)..(4): Alpha-Me R8-octenyl-alanine olefin amino acid connected by an all-carbon crosslinker comprising one double bond
  misc_feature (4)..(11): Crosslink between residues
  MOD_RES (10)..(10): Cyclobutyl-Ala
  MOD_RES (11)..(11): Alpha-Me S5-pentenyl-alanine olefin amino acid connected by an all-carbon crosslinker comprising one double bond
  C-term NH2
LTFAEYWAQAASAAAA

SEQ ID NO: 1126 - protein, 15 aa, Artificial Sequence
  Description of Artificial Sequence: Synthetic peptide
  N-term Ac
  MOD_RES (5)..(5): Alpha-Me R8-octenyl-alanine olefin amino acid connected by an all-carbon crosslinker comprising one double bond
  misc_feature (5)..(12): Crosslink between residues
  MOD_RES (11)..(11): Cyclobutyl-Ala
  MOD_RES (12)..(12): Alpha-Me S5-pentenyl-alanine olefin amino acid connected by an all-carbon crosslinker comprising one double bond
  C-term NH2
ALTFAEYWAQAASAA

SEQ ID NO: 1127 - protein, 16 aa, Artificial Sequence
  Description of Artificial Sequence: Synthetic peptide
  N-term Ac
  MOD_RES (5)..(5): Alpha-Me R8-octenyl-alanine olefin amino acid connected by an all-carbon crosslinker comprising one double bond
  misc_feature (5)..(12): Crosslink between residues
  MOD_RES (11)..(11): Cyclobutyl-Ala
  MOD_RES (12)..(12): Alpha-Me S5-pentenyl-alanine olefin amino acid connected by an all-carbon crosslinker comprising one double bond
  C-term NH2
ALTFAEYWAQAASAAA

SEQ ID NO: 1128 - protein, 15 aa, Artificial Sequence
  Description of Artificial Sequence: Synthetic peptide
  N-term Ac
  MOD_RES (5)..(5): Alpha-Me R8-octenyl-alanine olefin amino acid connected by an all-carbon crosslinker comprising one double bond
  misc_feature (5)..(12): Crosslink between residues
  MOD_RES (11)..(11): Cyclobutyl-Ala
  MOD_RES (12)..(12): Alpha-Me S5-pentenyl-alanine olefin amino acid connected by an all-carbon crosslinker comprising one double bond
  C-term NH2
ALTFAEYWAQAASAA

SEQ ID NO: 1129 - protein, 17 aa, Artificial Sequence
  Description of Artificial Sequence: Synthetic peptide
  N-term Ac
  MOD_RES (4)..(4): Alpha-Me R8-octenyl-alanine olefin amino acid connected by an all-carbon crosslinker comprising one double bond
  misc_feature (4)..(11): Crosslink between residues
  MOD_RES (11)..(11): Alpha-Me S5-pentenyl-alanine olefin amino acid connected by an all-carbon crosslinker comprising one double bond
  MOD_RES (17)..(17): D-amino acid
  C-term NH2
LTFAEYWAQLAAAAAAA

SEQ ID NO: 1130 - protein, 14 aa, Artificial Sequence
  Description of Artificial Sequence: Synthetic peptide
  N-term Ac
  MOD_RES (4)..(4): Alpha-Me R8-octenyl-alanine olefin amino acid connected by an all-carbon crosslinker comprising one double bond
  misc_feature (4)..(11): Crosslink between residues
  MOD_RES (7)..(7): 6cl-Trp
  MOD_RES (10)..(10): Cyclobutyl-Ala
  MOD_RES (11)..(11): Alpha-Me S5-pentenyl-alanine olefin amino acid connected by an all-carbon crosslinker comprising one double bond
  C-term NH2
LTFAEYWAQAASAA

SEQ ID NO: 1131 - protein, 15 aa, Artificial Sequence
  Description of Artificial Sequence: Synthetic peptide
  N-term Ac
  MOD_RES (4)..(4): Alpha-Me R8-octenyl-alanine olefin amino acid connected by an all-carbon crosslinker comprising one double bond
  misc_feature (4)..(11): Crosslink between residues
  MOD_RES (6)..(6): 4-carboxy Phe
  MOD_RES (7)..(7): 6cl-Trp
  MOD_RES (10)..(10): Cyclobutyl-Ala
  MOD_RES (11)..(11): Alpha-Me S5-pentenyl-alanine olefin amino acid connected by an all-carbon crosslinker comprising one double bond
  MOD_RES (14)..(14): Norleucine
  C-term NH2
LTFAEFWAQAASALA

SEQ ID NO: 1132 - protein, 15 aa, Artificial Sequence
  Description of Artificial Sequence: Synthetic peptide
  N-term Ac
  MOD_RES (4)..(4): Alpha-Me R8-octenyl-alanine olefin amino acid connected by an all-carbon crosslinker comprising one double bond
  misc_feature (4)..(11): Crosslink between residues
  MOD_RES (6)..(6): 4-carboxy Phe
  MOD_RES (7)..(7): 6cl-Trp
  MOD_RES (10)..(10): Cyclobutyl-Ala
  MOD_RES (11)..(11): Alpha-Me S5-pentenyl-alanine olefin amino acid connected by an all-carbon crosslinker comprising one double bond
  MOD_RES (14)..(14): Norleucine
  C-term NH2
LTFAEFWAQAASALA

SEQ ID NO: 1133 - protein, 15 aa, Artificial Sequence
  Description of Artificial Sequence: Synthetic peptide
  N-term Ac
  MOD_RES (4)..(4): Alpha-Me R8-octenyl-alanine olefin amino acid connected by an all-carbon crosslinker comprising one double bond
  misc_feature (4)..(11): Crosslink between residues
  MOD_RES (6)..(6): 4-carboxy Phe
  MOD_RES (7)..(7): 6cl-Trp
  MOD_RES (10)..(10): Cyclobutyl-Ala
  MOD_RES (11)..(11): Alpha-Me S5-pentenyl-alanine olefin amino acid connected by an all-carbon crosslinker comprising one double bond
  MOD_RES (15)..(15): D-amino acid
  C-term NH2
LTFAEFWAQAAAAIA

SEQ ID NO: 1134 - protein, 15 aa, Artificial Sequence
  Description of Artificial Sequence: Synthetic peptide
  N-term Ac
  MOD_RES (4)..(4): Alpha-Me R8-octenyl-alanine olefin amino acid connected by an all-carbon crosslinker comprising one double bond
  misc_feature (4)..(11): Crosslink between residues
  MOD_RES (6)..(6): 4-carboxy Phe
  MOD_RES (7)..(7): 6cl-Trp
  MOD_RES (10)..(10): Cyclobutyl-Ala
  MOD_RES (11)..(11): Alpha-Me S5-pentenyl-alanine olefin amino acid connected by an all-carbon crosslinker comprising one double bond
  MOD_RES (15)..(15): D-amino acid
  C-term NH2
LTFAEFWAQAAAAIA

SEQ ID NO: 1135 - protein, 17 aa, Artificial Sequence
  Description of Artificial Sequence: Synthetic peptide
  N-term Ac
  MOD_RES (4)..(4): Alpha-Me R8-octenyl-alanine olefin amino acid connected by an all-carbon crosslinker comprising one double bond
  misc_feature (4)..(11): Crosslink between residues
  MOD_RES (7)..(7): 6cl-Trp
  MOD_RES (11)..(11): Alpha-Me S5-pentenyl-alanine olefin amino acid connected by an all-carbon crosslinker comprising one double bond
  MOD_RES (17)..(17): D-amino acid
  C-term NH2
LTFAAYWAQLAAAAAAA

SEQ ID NO: 1136 - protein, 17 aa, Artificial Sequence
  Description of Artificial Sequence: Synthetic peptide
  N-term Ac
  MOD_RES (4)..(4): Alpha-Me R8-octenyl-alanine olefin amino acid connected by an all-carbon crosslinker comprising one double bond
  misc_feature (4)..(11): Crosslink between residues
  MOD_RES (7)..(7): 6cl-Trp
  MOD_RES (11)..(11): Alpha-Me S5-pentenyl-alanine olefin amino acid connected by an all-carbon crosslinker comprising one double bond
  MOD_RES (17)..(17): D-amino acid
  C-term NH2
LTFAAYWAQLAAAAAAA

SEQ ID NO: 1137 - protein, 16 aa, Artificial Sequence
  Description of Artificial Sequence: Synthetic peptide
  N-term Ac
  MOD_RES (2)..(2): Alpha-Me R8-octenyl-alanine olefin amino acid connected by an all-carbon crosslinker comprising one double bond
  misc_feature (2)..(4): Crosslink between residues
  MOD_RES (5)..(5): 6cl-Trp
  MOD_RES (16)..(16): D-amino acid
  C-term NH2
FAAYWEALAAAAAAAA

SEQ ID NO: 1138 - protein, 17 aa, Artificial Sequence
  Description of Artificial Sequence: Synthetic peptide
  N-term Ac
  MOD_RES (4)..(4): Alpha-Me R8-octenyl-alanine olefin amino acid connected by an all-carbon crosslinker comprising one double bond
  misc_feature (4)..(11): Crosslink between residues
  MOD_RES (11)..(11): Alpha-Me S5-pentenyl-alanine olefin amino acid connected by an all-carbon crosslinker comprising one double bond
  MOD_RES (17)..(17): D-amino acid
  C-term NH2
ETFAEYWAQLAAAAAAA

SEQ ID NO: 1139 - protein, 17 aa, Artificial Sequence
  Description of Artificial Sequence: Synthetic peptide
  N-term Ac
  MOD_RES (4)..(4): Alpha-Me R8-octenyl-alanine olefin amino acid connected by an all-carbon crosslinker comprising one double bond
  misc_feature (4)..(11): Crosslink between residues
  MOD_RES (11)..(11): Alpha-Me S5-pentenyl-alanine olefin amino acid connected by an all-carbon crosslinker comprising one double bond
  MOD_RES (17)..(17): D-amino acid
  C-term NH2
ETFAEYWAQLAAAAAAA

SEQ ID NO: 1140 - protein, 18 aa, Artificial Sequence
  Description of Artificial Sequence: Synthetic peptide
  N-term Ac
  MOD_RES (4)..(4): Alpha-Me R8-octenyl-alanine olefin amino acid connected by an all-carbon crosslinker comprising one double bond
  misc_feature (4)..(11): Crosslink between residues
  MOD_RES (11)..(11): Alpha-Me S5-pentenyl-alanine olefin amino acid connected by an all-carbon crosslinker comprising one double bond
  MOD_RES (18)..(18): D-amino acid
  C-term NH2
LTFAEYWAQLAAAAAAAA

SEQ ID NO: 1141 - protein, 18 aa, Artificial Sequence
  Description of Artificial Sequence: Synthetic peptide
  N-term Ac
  MOD_RES (4)..(4): Alpha-Me R8-octenyl-alanine olefin amino acid connected by an all-carbon crosslinker comprising one double bond
  misc_feature (4)..(11): Crosslink between residues
  MOD_RES (11)..(11): Alpha-Me S5-pentenyl-alanine olefin amino acid connected by an all-carbon crosslinker comprising one double bond
  MOD_RES (18)..(18): D-amino acid
  C-term NH2
LTFAEYWAQLAAAAAAAA

SEQ ID NO: 1142 - protein, 17 aa, Artificial Sequence
  Description of Artificial Sequence: Synthetic peptide
  N-term Ac
  MOD_RES (4)..(4): Alpha-Me R8-octenyl-alanine olefin amino acid connected by an all-carbon crosslinker comprising one double bond
  misc_feature (4)..(11): Crosslink between residues
  MOD_RES (11)..(11): Alpha-Me S5-pentenyl-alanine olefin amino acid connected by an all-carbon crosslinker comprising one double bond
  MOD_RES (14)..(14): Norleucine
  MOD_RES (17)..(17): D-amino acid
  C-term NH2
LTFAAYWAQLAAALAAA

SEQ ID NO: 1143 - protein, 17 aa, Artificial Sequence
  Description of Artificial Sequence: Synthetic peptide
  N-term Ac
  MOD_RES (4)..(4): Alpha-Me R8-octenyl-alanine olefin amino acid connected by an all-carbon crosslinker comprising one double bond
  misc_feature (4)..(11): Crosslink between residues
  MOD_RES (11)..(11): Alpha-Me S5-pentenyl-alanine olefin amino acid connected by an all-carbon crosslinker comprising one double bond
  MOD_RES (14)..(14): Norleucine
  MOD_RES (17)..(17): D-amino acid
  C-term NH2
LTFAAYWAQLAAALAAA

SEQ ID NO: 1144 - protein, 17 aa, Artificial Sequence
  Description of Artificial Sequence: Synthetic peptide
  N-term Ac
  MOD_RES (4)..(4): Alpha-Me R8-octenyl-alanine olefin amino acid connected by an all-carbon crosslinker comprising one double bond
  misc_feature (4)..(11): Crosslink between residues
  MOD_RES (10)..(10): Cyclobutyl-Ala
  MOD_RES (11)..(11): Alpha-Me S5-pentenyl-alanine olefin amino acid connected by an all-carbon crosslinker comprising one double bond
  MOD_RES (17)..(17): D-amino acid
  C-term NH2
LTFAEYWAQAAAAAAAA

SEQ ID NO: 1145 - protein, 17 aa, Artificial Sequence
  Description of Artificial Sequence: Synthetic peptide
  N-term Ac
  MOD_RES (4)..(4): Alpha-Me R8-octenyl-alanine olefin amino acid connected by an all-carbon crosslinker comprising one double bond
  misc_feature (4)..(11): Crosslink between residues
  MOD_RES (10)..(10): Cyclobutyl-Ala
  MOD_RES (11)..(11): Alpha-Me S5-pentenyl-alanine olefin amino acid connected by an all-carbon crosslinker comprising one double bond
  MOD_RES (17)..(17): D-amino acid
  C-term NH2
LTFAEYWAQAAAAAAAA

SEQ ID NO: 1146 - protein, 17 aa, Artificial Sequence
  Description of Artificial Sequence: Synthetic peptide
  N-term Ac
  MOD_RES (4)..(4): Alpha-Me R8-octenyl-alanine olefin amino acid connected by an all-carbon crosslinker comprising one double bond
  misc_feature (4)..(11): Crosslink between residues
  MOD_RES (6)..(6): 4-carboxy Phe
  MOD_RES (10)..(10): Cyclobutyl-Ala
  MOD_RES (11)..(11): Alpha-Me S5-pentenyl-alanine olefin amino acid connected by an all-carbon crosslinker comprising one double bond
  MOD_RES (17)..(17): D-amino acid
  C-term NH2
LTFAEFWAQAAAAAAAA

SEQ ID NO: 1147 - protein, 17 aa, Artificial Sequence
  Description of Artificial Sequence: Synthetic peptide
  N-term Ac
  MOD_RES (4)..(4): Alpha-Me R8-octenyl-alanine olefin amino acid connected by an all-carbon crosslinker comprising one double bond
  misc_feature (4)..(11): Crosslink between residues
  MOD_RES (6)..(6): 4-carboxy Phe
  MOD_RES (10)..(10): Cyclobutyl-Ala
  MOD_RES (11)..(11): Alpha-Me S5-pentenyl-alanine olefin amino acid connected by an all-carbon crosslinker comprising one double bond
  MOD_RES (17)..(17): D-amino acid
  C-term NH2
LTFAEFWAQAAAAAAAA

SEQ ID NO: 1148 - protein, 17 aa, Artificial Sequence
  Description of Artificial Sequence: Synthetic peptide
  N-term Ac
  MOD_RES (4)..(4): Alpha-Me R8-octenyl-alanine olefin amino acid connected by an all-carbon crosslinker comprising one double bond
  misc_feature (4)..(11): Crosslink between residues
  MOD_RES (10)..(10): Cyclobutyl-Ala
  MOD_RES (11)..(11): Alpha-Me S5-pentenyl-alanine olefin amino acid connected by an all-carbon crosslinker comprising one double bond
  MOD_RES (17)..(17): D-amino acid
  C-term NH2
LTFAEYWSQAAAAAAAA

SEQ ID NO: 1149 - protein, 17 aa, Artificial Sequence
  Description of Artificial Sequence: Synthetic peptide
  N-term Ac
  MOD_RES (4)..(4): Alpha-Me R8-octenyl-alanine olefin amino acid connected by an all-carbon crosslinker comprising one double bond
  misc_feature (4)..(11): Crosslink between residues
  MOD_RES (10)..(10): Cyclobutyl-Ala
  MOD_RES (11)..(11): Alpha-Me S5-pentenyl-alanine olefin amino acid connected by an all-carbon crosslinker comprising one double bond
  MOD_RES (17)..(17): D-amino acid
  C-term NH2
LTFAEYWSQAAAAAAAA

SEQ ID NO: 1150 - protein, 15 aa, Artificial Sequence
  Description of Artificial Sequence: Synthetic peptide
  N-term Ac
  MOD_RES (4)..(4): Alpha-Me R8-octenyl-alanine olefin amino acid connected by an all-carbon crosslinker comprising one double bond
  misc_feature (4)..(11): Crosslink between residues
  MOD_RES (10)..(10): Cyclobutyl-Ala
  MOD_RES (11)..(11): Alpha-Me S5-pentenyl-alanine olefin amino acid connected by an all-carbon crosslinker comprising one double bond
  MOD_RES (15)..(15): D-amino acid
  C-term NH2
LTFAEYWAQAASAAA

SEQ ID NO: 1151 - protein, 15 aa, Artificial Sequence
  Description of Artificial Sequence: Synthetic peptide
  N-term Ac
  MOD_RES (4)..(4): Alpha-Me R8-octenyl-alanine olefin amino acid connected by an all-carbon crosslinker comprising one double bond
  misc_feature (4)..(11): Crosslink between residues
  MOD_RES (10)..(10): Cyclobutyl-Ala
  MOD_RES (11)..(11): Alpha-Me S5-pentenyl-alanine olefin amino acid connected by an all-carbon crosslinker comprising one double bond
  MOD_RES (15)..(15): D-amino acid
  C-term NH2
LTFAEYWAQAASAAA

SEQ ID NO: 1152 - protein, 16 aa, Artificial Sequence
  Description of Artificial Sequence: Synthetic peptide
  N-term Ac
  MOD_RES (5)..(5): Alpha-Me R8-octenyl-alanine olefin amino acid connected by an all-carbon crosslinker comprising one double bond
  misc_feature (5)..(12): Crosslink between residues
  MOD_RES (11)..(11): Cyclobutyl-Ala
  MOD_RES (12)..(12): Alpha-Me S5-pentenyl-alanine olefin amino acid connected by an all-carbon crosslinker comprising one double bond
  MOD_RES (16)..(16): D-amino acid
  C-term NH2
ALTFAEYWAQAASAAA

SEQ ID NO: 1153 - protein, 16 aa, Artificial Sequence
  Description of Artificial Sequence: Synthetic peptide
  N-term Ac
  MOD_RES (5)..(5): Alpha-Me R8-octenyl-alanine olefin amino acid connected by an all-carbon crosslinker comprising one double bond
  misc_feature (5)..(12): Crosslink between residues
  MOD_RES (11)..(11): Cyclobutyl-Ala
  MOD_RES (12)..(12): Alpha-Me S5-pentenyl-alanine olefin amino acid connected by an all-carbon crosslinker comprising one double bond
  MOD_RES (16)..(16): D-amino acid
  C-term NH2
ALTFAEYWAQAASAAA

SEQ ID NO: 1154 - protein, 17 aa, Artificial Sequence
  Description of Artificial Sequence: Synthetic peptide
  N-term Ac
  MOD_RES (5)..(5): Alpha-Me R8-octenyl-alanine olefin amino acid connected by an all-carbon crosslinker comprising one double bond
  misc_feature (5)..(12): Crosslink between residues
  MOD_RES (11)..(11): Cyclobutyl-Ala
  MOD_RES (12)..(12): Alpha-Me S5-pentenyl-alanine olefin amino acid connected by an all-carbon crosslinker comprising one double bond
  MOD_RES (17)..(17): D-amino acid
  C-term NH2
ALTFAEYWAQAASAAAA

SEQ ID NO: 1155 - protein, 17 aa, Artificial Sequence
  Description of Artificial Sequence: Synthetic peptide
  N-term Ac
  MOD_RES (5)..(5): Alpha-Me R8-octenyl-alanine olefin amino acid connected by an all-carbon crosslinker comprising one double bond
  misc_feature (5)..(12): Crosslink between residues
  MOD_RES (11)..(11): Cyclobutyl-Ala
  MOD_RES (12)..(12): Alpha-Me S5-pentenyl-alanine olefin amino acid connected by an all-carbon crosslinker comprising one double bond
  MOD_RES (17)..(17): D-amino acid
  C-term NH2
ALTFAEYWAQAASAAAA

SEQ ID NO: 1156 - protein, 18 aa, Artificial Sequence
  Description of Artificial Sequence: Synthetic peptide
  N-term Ac
  MOD_RES (6)..(6): Alpha-Me R8-octenyl-alanine olefin amino acid connected by an all-carbon crosslinker comprising one double bond
  misc_feature (6)..(13): Crosslink between residues
  MOD_RES (12)..(12): Cyclobutyl-Ala
  MOD_RES (13)..(13): Alpha-Me S5-pentenyl-alanine olefin amino acid connected by an all-carbon crosslinker comprising one double bond
  MOD_RES (18)..(18): D-amino acid
  C-term NH2
AALTFAEYWAQAASAAAA

SEQ ID NO: 1157 - protein, 18 aa, Artificial Sequence
  Description of Artificial Sequence: Synthetic peptide
  N-term Ac
  MOD_RES (6)..(6): Alpha-Me R8-octenyl-alanine olefin amino acid connected by an all-carbon crosslinker comprising one double bond
  misc_feature (6)..(13): Crosslink between residues
  MOD_RES (12)..(12): Cyclobutyl-Ala
  MOD_RES (13)..(13): Alpha-Me S5-pentenyl-alanine olefin amino acid connected by an all-carbon crosslinker comprising one double bond
  MOD_RES (18)..(18): D-amino acid
  C-term NH2
AALTFAEYWAQAASAAAA

SEQ ID NO: 1158 - protein, 14 aa, Artificial Sequence
  Description of Artificial Sequence: Synthetic peptide
  N-term Ac
  MOD_RES (4)..(4): Alpha-Me R8-octenyl-alanine olefin amino acid connected by an all-carbon crosslinker comprising one double bond
  misc_feature (4)..(11): Crosslink between residues
  MOD_RES (10)..(10): Cyclobutyl-Ala
  MOD_RES (11)..(11): Alpha-Me S5-pentenyl-alanine olefin amino acid connected by an all-carbon crosslinker comprising one double bond
  C-term NH2
RTFAEYWAQAASAA

SEQ ID NO: 1159 - protein, 14 aa, Artificial Sequence
  Description of Artificial Sequence: Synthetic peptide
  N-term Ac
  MOD_RES (4)..(4): Alpha-Me R8-octenyl-alanine olefin amino acid connected by an all-carbon crosslinker comprising one double bond
  misc_feature (4)..(11): Crosslink between residues
  MOD_RES (10)..(10): Cyclobutyl-Ala
  MOD_RES (11)..(11): Alpha-Me S5-pentenyl-alanine olefin amino acid connected by an all-carbon crosslinker comprising one double bond
  C-term NH2
LRFAEYWAQAASAA

SEQ ID NO: 1160 - protein, 14 aa, Artificial Sequence
  Description of Artificial Sequence: Synthetic peptide
  N-term Ac
  MOD_RES (4)..(4): Alpha-Me R8-octenyl-alanine olefin amino acid connected by an all-carbon crosslinker comprising one double bond
  misc_feature (4)..(11): Crosslink between residues
  MOD_RES (10)..(10): Cyclobutyl-Ala
  MOD_RES (11)..(11): Alpha-Me S5-pentenyl-alanine olefin amino acid connected by an all-carbon crosslinker comprising one double bond
  C-term NH2
LTFAEYWRQAASAA

SEQ ID NO: 1161 - protein, 14 aa, Artificial Sequence
  Description of Artificial Sequence: Synthetic peptide
  N-term Ac
  MOD_RES (4)..(4): Alpha-Me R8-octenyl-alanine olefin amino acid connected by an all-carbon crosslinker comprising one double bond
  misc_feature (4)..(11): Crosslink between residues
  MOD_RES (10)..(10): Cyclobutyl-Ala
  MOD_RES (11)..(11): Alpha-Me S5-pentenyl-alanine olefin amino acid connected by an all-carbon crosslinker comprising one double bond
  C-term NH2
LTFAEYWARAASAA

SEQ ID NO: 1162 - protein, 14 aa, Artificial Sequence
  Description of Artificial Sequence: Synthetic peptide
  N-term Ac
  MOD_RES (4)..(4): Alpha-Me R8-octenyl-alanine olefin amino acid connected by an all-carbon crosslinker comprising one double bond
  misc_feature (4)..(11): Crosslink between residues
  MOD_RES (10)..(10): Cyclobutyl-Ala
  MOD_RES (11)..(11): Alpha-Me S5-pentenyl-alanine olefin amino acid connected by an all-carbon crosslinker comprising one double bond
  C-term NH2
LTFAEYWAQAARAA

SEQ ID NO: 1163 - protein, 14 aa, Artificial Sequence
  Description of Artificial Sequence: Synthetic peptide
  N-term Ac
  MOD_RES (4)..(4): Alpha-Me R8-octenyl-alanine olefin amino acid connected by an all-carbon crosslinker comprising one double bond
  misc_feature (4)..(11): Crosslink between residues
  MOD_RES (10)..(10): Cyclobutyl-Ala
  MOD_RES (11)..(11): Alpha-Me S5-pentenyl-alanine olefin amino acid connected by an all-carbon crosslinker comprising one double bond
  C-term NH2
LTFAEYWAQAASRA

SEQ ID NO: 1164 - protein, 14 aa, Artificial Sequence
  Description of Artificial Sequence: Synthetic peptide
  N-term Ac
  MOD_RES (4)..(4): Alpha-Me R8-octenyl-alanine olefin amino acid connected by an all-carbon crosslinker comprising one double bond
  misc_feature (4)..(11): Crosslink between residues
  MOD_RES (10)..(10): Cyclobutyl-Ala
  MOD_RES (11)..(11): Alpha-Me S5-pentenyl-alanine olefin amino acid connected by an all-carbon crosslinker comprising one double bond
  C-term NH2
LTFAEYWAQAASAR

SEQ ID NO: 1165 - protein, 15 aa, Artificial Sequence
  Description of Artificial Sequence: Synthetic peptide
  N-term 5-FAM
  MOD_RES (1)..(1): Beta-Ala
  MOD_RES (5)..(5): Alpha-Me R8-octenyl-alanine olefin amino acid connected by an all-carbon crosslinker comprising one double bond
  misc_feature (5)..(12): Crosslink between residues
  MOD_RES (11)..(11): Cyclobutyl-Ala
  MOD_RES (12)..(12): Alpha-Me S5-pentenyl-alanine olefin amino acid connected by an all-carbon crosslinker comprising one double bond
  C-term NH2
ALTFAEYWAQAASAA

SEQ ID NO: 1166 - protein, 16 aa, Artificial Sequence
  Description of Artificial Sequence: Synthetic peptide
  N-term 5-FAM
  MOD_RES (1)..(1): Beta-Ala
  MOD_RES (5)..(5): Alpha-Me R8-octenyl-alanine olefin amino acid connected by an all-carbon crosslinker comprising one double bond
  misc_feature (5)..(12): Crosslink between residues
  MOD_RES (12)..(12): Alpha-Me S5-pentenyl-alanine olefin amino acid connected by an all-carbon crosslinker comprising one double bond
  MOD_RES (15)..(15): Norleucine
  C-term NH2
ALTFAAYWAQLAAALA

SEQ ID NO: 1167 - protein, 15 aa, Artificial Sequence
  Description of Artificial Sequence: Synthetic peptide
  N-term Ac
  MOD_RES (4)..(4): Alpha-Me R8-octenyl-alanine olefin amino acid connected by an all-carbon crosslinker comprising one double bond
  misc_feature (4)..(11): Crosslink between residues
  MOD_RES (11)..(11): Alpha-Me S5-pentenyl-alanine olefin amino acid connected by an all-carbon crosslinker comprising one double bond
  MOD_RES (14)..(14): Norleucine
  C-term NH2
LAFAEYWAQLAAALA

SEQ ID NO: 1168 - protein, 15 aa, Artificial Sequence
  Description of Artificial Sequence: Synthetic peptide
  N-term Ac
  MOD_RES (4)..(4): Alpha-Me R8-octenyl-alanine olefin amino acid connected by an all-carbon crosslinker comprising one double bond
  misc_feature (4)..(11): Crosslink between residues
  MOD_RES (11)..(11): Alpha-Me S5-pentenyl-alanine olefin amino acid connected by an all-carbon crosslinker comprising one double bond
  MOD_RES (14)..(14): Norleucine
  C-term NH2
ATFAEYWAQLAAALA

SEQ ID NO: 1169 - protein, 15 aa, Artificial Sequence
  Description of Artificial Sequence: Synthetic peptide
  N-term Ac
  MOD_RES (4)..(4): Alpha-Me R8-octenyl-alanine olefin amino acid connected by an all-carbon crosslinker comprising one double bond
  misc_feature (4)..(11): Crosslink between residues
  MOD_RES (11)..(11): Alpha-Me S5-pentenyl-alanine olefin amino acid connected by an all-carbon crosslinker comprising one double bond
  MOD_RES (14)..(14): Norleucine
  C-term NH2
AAFAEYWAQLAAALA

SEQ ID NO: 1170 - protein, 16 aa, Artificial Sequence
  Description of Artificial Sequence: Synthetic peptide
  N-term Ac
  MOD_RES (5)..(5): Alpha-Me R8-octenyl-alanine olefin amino acid connected by an all-carbon crosslinker comprising one double bond
  misc_feature (5)..(12): Crosslink between residues
  MOD_RES (12)..(12): Alpha-Me S5-pentenyl-alanine olefin amino acid connected by an all-carbon crosslinker comprising one double bond
  MOD_RES (15)..(15): Norleucine
  C-term NH2
AAAFAEYWAQLAAALA

SEQ ID NO: 1171 - protein, 17 aa, Artificial Sequence
  Description of Artificial Sequence: Synthetic peptide
  N-term Ac
  MOD_RES (6)..(6): Alpha-Me R8-octenyl-alanine olefin amino acid connected by an all-carbon crosslinker comprising one double bond
  misc_feature (6)..(13): Crosslink between residues
  MOD_RES (13)..(13): Alpha-Me S5-pentenyl-alanine olefin amino acid connected by an all-carbon crosslinker comprising one double bond
  MOD_RES (16)..(16): Norleucine
  C-term NH2
AAAAFAEYWAQLAAALA

SEQ ID NO: 1172 - protein, 16 aa, Artificial Sequence
  Description of Artificial Sequence: Synthetic peptide
  N-term Ac
  MOD_RES (5)..(5): Alpha-Me R8-octenyl-alanine olefin amino acid connected by an all-carbon crosslinker comprising one double bond
  misc_feature (5)..(12): Crosslink between residues
  MOD_RES (12)..(12): Alpha-Me S5-pentenyl-alanine olefin amino acid connected by an all-carbon crosslinker comprising one double bond
  MOD_RES (15)..(15): Norleucine
  C-term NH2
AATFAEYWAQLAAALA

SEQ ID NO: 1173 - protein, 17 aa, Artificial Sequence
  Description of Artificial Sequence: Synthetic peptide
  N-term Ac
  MOD_RES (6)..(6): Alpha-Me R8-octenyl-alanine olefin amino acid connected by an all-carbon crosslinker comprising one double bond
  misc_feature (6)..(13): Crosslink between residues
  MOD_RES (13)..(13): Alpha-Me S5-pentenyl-alanine olefin amino acid connected by an all-carbon crosslinker comprising one double bond
  MOD_RES (16)..(16): Norleucine
  C-term NH2
AALTFAEYWAQLAAALA

SEQ ID NO: 1174 - protein, 18 aa, Artificial Sequence
  Description of Artificial Sequence: Synthetic peptide
  N-term Ac
  MOD_RES (7)..(7): Alpha-Me R8-octenyl-alanine olefin amino acid connected by an all-carbon crosslinker comprising one double bond
  misc_feature (7)..(14): Crosslink between residues
  MOD_RES (14)..(14): Alpha-Me S5-pentenyl-alanine olefin amino acid connected by an all-carbon crosslinker comprising one double bond
  MOD_RES (17)..(17): Norleucine
  C-term NH2
AAALTFAEYWAQLAAALA

SEQ ID NO: 1175 - protein, 16 aa, Artificial Sequence
  Description of Artificial Sequence: Synthetic peptide
  N-term Ac
  MOD_RES (4)..(4): Alpha-Me R8-octenyl-alanine olefin amino acid connected by an all-carbon crosslinker comprising one double bond
  misc_feature (4)..(11): Crosslink between residues
  MOD_RES (11)..(11): Alpha-Me S5-pentenyl-alanine olefin amino acid connected by an all-carbon crosslinker comprising one double bond
  MOD_RES (14)..(14): Norleucine
  C-term NH2
LTFAEYWAQLAAALAA

SEQ ID NO: 1176 - protein, 17 aa, Artificial Sequence
  Description of Artificial Sequence: Synthetic peptide
  N-term Ac
  MOD_RES (5)..(5): Alpha-Me R8-octenyl-alanine olefin amino acid connected by an all-carbon crosslinker comprising one double bond
  misc_feature (5)..(12): Crosslink between residues
  MOD_RES (12)..(12): Alpha-Me S5-pentenyl-alanine olefin amino acid connected by an all-carbon crosslinker comprising one double bond
  MOD_RES (15)..(15): Norleucine
  C-term NH2
ALTFAEYWAQLAAALAA

SEQ ID NO: 1177 - protein, 18 aa, Artificial Sequence
  Description of Artificial Sequence: Synthetic peptide
  N-term Ac
  MOD_RES (6)..(6): Alpha-Me R8-octenyl-alanine olefin amino acid connected by an all-carbon crosslinker comprising one double bond
  misc_feature (6)..(13): Crosslink between residues
  MOD_RES (13)..(13): Alpha-Me S5-pentenyl-alanine olefin amino acid connected by an all-carbon crosslinker comprising one double bond
  MOD_RES (16)..(16): Norleucine
  C-term NH2
AALTFAEYWAQLAAALAA

SEQ ID NO: 1178 - protein, 16 aa, Artificial Sequence
  Description of Artificial Sequence: Synthetic peptide
  N-term Ac
  MOD_RES (4)..(4): Alpha-Me R8-octenyl-alanine olefin amino acid connected by an all-carbon crosslinker comprising one double bond
  misc_feature (4)..(11): Crosslink between residues
  MOD_RES (10)..(10): Cyclobutyl-Ala
  MOD_RES (11)..(11): Alpha-Me S5-pentenyl-alanine olefin amino acid connected by an all-carbon crosslinker comprising one double bond
  MOD_RES (14)..(14): Norleucine
  C-term NH2
LTFAEYWAQAAAALAA

SEQ ID NO: 1179 - protein, 16 aa, Artificial Sequence
  Description of Artificial Sequence: Synthetic peptide
  N-term Ac
  MOD_RES (4)..(4): Alpha-Me R8-octenyl-alanine olefin amino acid connected by an all-carbon crosslinker comprising one double bond
  misc_feature (4)..(11): Crosslink between residues
  MOD_RES (10)..(10): hLeu
  MOD_RES (11)..(11): Alpha-Me S5-pentenyl-alanine olefin amino acid connected by an all-carbon crosslinker comprising one double bond
  MOD_RES (14)..(14): Norleucine
  C-term NH2
LTFAEYWAQLAAALAA

SEQ ID NO: 1180 - protein, 17 aa, Artificial Sequence
  Description of Artificial Sequence: Synthetic peptide
  N-term Ac
  MOD_RES (5)..(5): Alpha-Me R8-octenyl-alanine olefin amino acid connected by an all-carbon crosslinker comprising one double bond
  misc_feature (5)..(12): Crosslink between residues
  MOD_RES (11)..(11): hLeu
  MOD_RES (12)..(12): Alpha-Me S5-pentenyl-alanine olefin amino acid connected by an all-carbon crosslinker comprising one double bond
  MOD_RES (15)..(15): Norleucine
  C-term NH2
ALTFAEYWAQLAAALAA

SEQ ID NO: 1181 - protein, 15 aa, Artificial Sequence
  Description of Artificial Sequence: Synthetic peptide
  N-term Ac
  MOD_RES (4)..(4): Alpha-Me R8-octenyl-alanine olefin amino acid connected by an all-carbon crosslinker comprising one double bond
  misc_feature (4)..(11): Crosslink between residues
  MOD_RES (6)..(6): N-methyl-Tyr
  MOD_RES (11)..(11): Alpha-Me S5-pentenyl-alanine olefin amino acid connected by an all-carbon crosslinker comprising one double bond
  MOD_RES (14)..(14): Norleucine
  C-term NH2
LTFAAYWAQLAAALA

SEQ ID NO: 1182 - protein, 15 aa, Artificial Sequence
  Description of Artificial Sequence: Synthetic peptide
  N-term Ac
  MOD_RES (4)..(4): Alpha-Me R8-octenyl-alanine olefin amino acid connected by an all-carbon crosslinker comprising one double bond
  misc_feature (4)..(11): Crosslink between residues
  MOD_RES (6)..(6): N-methyl-Tyr
  MOD_RES (11)..(11): Alpha-Me S5-pentenyl-alanine olefin amino acid connected by an all-carbon crosslinker comprising one double bond
  MOD_RES (14)..(14): Norleucine
  C-term NH2
LTFAAYWAQLAAALA

SEQ ID NO: 1183 - protein, 15 aa, Artificial Sequence
  Description of Artificial Sequence: Synthetic peptide
  N-term Ac
  MOD_RES (4)..(4): Alpha-Me R8-octenyl-alanine olefin amino acid connected by an all-carbon crosslinker comprising one double bond
  misc_feature (4)..(11): Crosslink between residues
  MOD_RES (7)..(7): N-methyl-Trp
  MOD_RES (11)..(11): Alpha-Me S5-pentenyl-alanine olefin amino acid connected by an all-carbon crosslinker comprising one double bond
  MOD_RES (14)..(14): Norleucine
  C-term NH2
LTFAAYWAQLAAALA

SEQ ID NO: 1184 - protein, 15 aa, Artificial Sequence
  Description of Artificial Sequence: Synthetic peptide
  N-term Ac
  MOD_RES (4)..(4): Alpha-Me R8-octenyl-alanine olefin amino acid connected by an all-carbon crosslinker comprising one double bond
  misc_feature (4)..(11): Crosslink between residues
  MOD_RES (7)..(7): N-methyl-Trp
  MOD_RES (11)..(11): Alpha-Me S5-pentenyl-alanine olefin amino acid connected by an all-carbon crosslinker comprising one double bond
  MOD_RES (14)..(14): Norleucine
  C-term NH2
LTFAAYWAQLAAALA

SEQ ID NO: 1185 - protein, 15 aa, Artificial Sequence
  Description of Artificial Sequence: Synthetic peptide
  N-term Ac
  MOD_RES (4)..(4): Alpha-Me R8-octenyl-alanine olefin amino acid connected by an all-carbon crosslinker comprising one double bond
  misc_feature (4)..(11): Crosslink between residues
  MOD_RES (7)..(7): Alpha-Me-Trp
  MOD_RES (11)..(11): Alpha-Me S5-pentenyl-alanine olefin amino acid connected by an all-carbon crosslinker comprising one double bond
  MOD_RES (14)..(14): Norleucine
  C-term NH2
LTFAAYWAQLAAALA

SEQ ID NO: 1186 - protein, 15 aa, Artificial Sequence
  Description of Artificial Sequence: Synthetic peptide
  N-term Ac
  MOD_RES (4)..(4): Alpha-Me R8-octenyl-alanine olefin amino acid connected by an all-carbon crosslinker comprising one double bond
  misc_feature (4)..(11): Crosslink between residues
  MOD_RES (7)..(7): Alpha-Me-Trp
  MOD_RES (11)..(11): Alpha-Me S5-pentenyl-alanine olefin amino acid connected by an all-carbon crosslinker comprising one double bond
  MOD_RES (14)..(14): Norleucine
  C-term NH2
LTFAAYWAQLAAALA

SEQ ID NO: 1187 - protein, 15 aa, Artificial Sequence
  Description of Artificial Sequence: Synthetic peptide
  N-term Ac
  MOD_RES (4)..(4): Alpha-Me R8-octenyl-alanine olefin amino acid connected by an all-carbon crosslinker comprising one double bond
  misc_feature (4)..(11): Crosslink between residues
  MOD_RES (8)..(8): 2-aminoisobutyric acid
  MOD_RES (11)..(11): Alpha-Me S5-pentenyl-alanine olefin amino acid connected by an all-carbon crosslinker comprising one double bond
  MOD_RES (14)..(14): Norleucine
  C-term NH2
LTFAAYWXQLAAALA

SEQ ID NO: 1188 - protein, 15 aa, Artificial Sequence
  Description of Artificial Sequence: Synthetic peptide
  N-term Ac
  MOD_RES (4)..(4): Alpha-Me R8-octenyl-alanine olefin amino acid connected by an all-carbon crosslinker comprising one double bond
  misc_feature (4)..(11): Crosslink between residues
  MOD_RES (8)..(8): 2-aminoisobutyric acid
  MOD_RES (11)..(11): Alpha-Me S5-pentenyl-alanine olefin amino acid connected by an all-carbon crosslinker comprising one double bond
  MOD_RES (14)..(14): Norleucine
  C-term NH2
LTFAAYWXQLAAALA

SEQ ID NO: 1189 - protein, 15 aa, Artificial Sequence
  Description of Artificial Sequence: Synthetic peptide
  N-term Ac
  MOD_RES (4)..(4): Alpha-Me R8-octenyl-alanine olefin amino acid connected by an all-carbon crosslinker comprising one double bond
  misc_feature (4)..(11): Crosslink between residues
  MOD_RES (11)..(11): Alpha-Me S5-pentenyl-alanine olefin amino acid connected by an all-carbon crosslinker comprising one double bond
  MOD_RES (13)..(13): 2-aminoisobutyric acid
  MOD_RES (14)..(14): Norleucine
  C-term NH2
LTFAAYWAQLAAXLA

SEQ ID NO: 1190 - protein, 15 aa, Artificial Sequence
  Description of Artificial Sequence: Synthetic peptide
  N-term Ac
  MOD_RES (4)..(4): Alpha-Me R8-octenyl-alanine olefin amino acid connected by an all-carbon crosslinker comprising one double bond
  misc_feature (4)..(11): Crosslink between residues
  MOD_RES (11)..(11): Alpha-Me S5-pentenyl-alanine olefin amino acid connected by an all-carbon crosslinker comprising one double bond
  MOD_RES (13)..(13): 2-aminoisobutyric acid
  MOD_RES (14)..(14): Norleucine
  C-term NH2
LTFAAYWAQLAAXLA

SEQ ID NO: 1191 - protein, 15 aa, Artificial Sequence
  Description of Artificial Sequence: Synthetic peptide
  N-term Ac
  MOD_RES (4)..(4): Alpha-Me R8-octenyl-alanine olefin amino acid connected by an all-carbon crosslinker comprising one double bond
  misc_feature (4)..(11): Crosslink between residues
  MOD_RES (11)..(11): Alpha-Me S5-pentenyl-alanine olefin amino acid connected by an all-carbon crosslinker comprising one double bond
  MOD_RES (13)..(13): D-amino acid
  MOD_RES (14)..(14): Norleucine
  C-term NH2
LTFAAYWAQLAAALA

SEQ ID NO: 1192 - protein, 15 aa, Artificial Sequence
  Description of Artificial Sequence: Synthetic peptide
  N-term Ac
  MOD_RES (4)..(4): Alpha-Me R8-octenyl-alanine olefin amino acid connected by an all-carbon crosslinker comprising one double bond
  misc_feature (4)..(11): Crosslink between residues
  MOD_RES (11)..(11): Alpha-Me S5-pentenyl-alanine olefin amino acid connected by an all-carbon crosslinker comprising one double bond
  MOD_RES (13)..(13): D-amino acid
  MOD_RES (14)..(14): Norleucine
  C-term NH2
LTFAAYWAQLAAALA

SEQ ID NO: 1193 - protein, 15 aa, Artificial Sequence
  Description of Artificial Sequence: Synthetic peptide
  N-term Ac
  MOD_RES (4)..(4): Alpha-Me R8-octenyl-alanine olefin amino acid connected by an all-carbon crosslinker comprising one double bond
  misc_feature (4)..(11): Crosslink between residues
  MOD_RES (11)..(11): Alpha-Me S5-pentenyl-alanine olefin amino acid connected by an all-carbon crosslinker comprising one double bond
  MOD_RES (13)..(13): Sarcosine
  MOD_RES (14)..(14): Norleucine
  C-term NH2
LTFAAYWAQLAAXLA

SEQ ID NO: 1194 - protein, 15 aa, Artificial Sequence
  Description of Artificial Sequence: Synthetic peptide
  N-term Ac
  MOD_RES (4)..(4): Alpha-Me R8-octenyl-alanine olefin amino acid connected by an all-carbon crosslinker comprising one double bond
  misc_feature (4)..(11): Crosslink between residues
  MOD_RES (11)..(11): Alpha-Me S5-pentenyl-alanine olefin amino acid connected by an all-carbon crosslinker comprising one double bond
  MOD_RES (13)..(13): Sarcosine
  MOD_RES (14)..(14): Norleucine
  C-term NH2
LTFAAYWAQLAAXLA

SEQ ID NO: 1195 - protein, 15 aa, Artificial Sequence
  Description of Artificial Sequence: Synthetic peptide
  N-term Ac
  MOD_RES (4)..(4): Alpha-Me R8-octenyl-alanine olefin amino acid connected by an all-carbon crosslinker comprising one double bond
  misc_feature (4)..(11): Crosslink between residues
  MOD_RES (11)..(11): Alpha-Me S5-pentenyl-alanine olefin amino acid connected by an all-carbon crosslinker comprising one double bond
  MOD_RES (14)..(14): Norleucine
  MOD_RES (15)..(15): 2-aminoisobutyric acid
  C-term NH2
LTFAAYWAQLAAALX

SEQ ID NO: 1196 - protein, 15 aa, Artificial Sequence
  Description of Artificial Sequence: Synthetic peptide
  N-term Ac
  MOD_RES (4)..(4): Alpha-Me R8-octenyl-alanine olefin amino acid connected by an all-carbon crosslinker comprising one double bond
  misc_feature (4)..(11): Crosslink between residues
  MOD_RES (11)..(11): Alpha-Me S5-pentenyl-alanine olefin amino acid connected by an all-carbon crosslinker comprising one double bond
  MOD_RES (14)..(14): Norleucine
  MOD_RES (15)..(15): 2-aminoisobutyric acid
  C-term NH2
LTFAAYWAQLAAALX

SEQ ID NO: 1197 - protein, 15 aa, Artificial Sequence
  Description of Artificial Sequence: Synthetic peptide
  N-term Ac
  MOD_RES (4)..(4): Alpha-Me R8-octenyl-alanine olefin amino acid connected by an all-carbon crosslinker comprising one double bond
  misc_feature (4)..(11): Crosslink between residues
  MOD_RES (11)..(11): Alpha-Me S5-pentenyl-alanine olefin amino acid connected by an all-carbon crosslinker comprising one double bond
  MOD_RES (14)..(14): Norleucine
  MOD_RES (15)..(15): N-methyl-Ala
  C-term NH2
LTFAAYWAQLAAALA

SEQ ID NO: 1198 - protein, 15 aa, Artificial Sequence
  Description of Artificial Sequence: Synthetic peptide
  N-term Ac
  MOD_RES (4)..(4): Alpha-Me R8-octenyl-alanine olefin amino acid connected by an all-carbon crosslinker comprising one double bond
  misc_feature (4)..(11): Crosslink between residues
  MOD_RES (11)..(11): Alpha-Me S5-pentenyl-alanine olefin amino acid connected by an all-carbon crosslinker comprising one double bond
  MOD_RES (14)..(14): Norleucine
  MOD_RES (15)..(15): N-methyl-Ala
  C-term NH2
LTFAAYWAQLAAALA

SEQ ID NO: 1199 - protein, 15 aa, Artificial Sequence
  Description of Artificial Sequence: Synthetic peptide
  N-term Ac
  MOD_RES (4)..(4): Alpha-Me R8-octenyl-alanine olefin amino acid connected by an all-carbon crosslinker comprising one double bond
  misc_feature (4)..(11): Crosslink between residues
  MOD_RES (11)..(11): Alpha-Me S5-pentenyl-alanine olefin amino acid connected by an all-carbon crosslinker comprising one double bond
  MOD_RES (14)..(14): Norleucine
  MOD_RES (15)..(15): Sarcosine
  C-term NH2
LTFAAYWAQLAAALX

SEQ ID NO: 1200 - protein, 15 aa, Artificial Sequence
  Description of Artificial Sequence: Synthetic peptide
  N-term Ac
  MOD_RES (4)..(4): Alpha-Me R8-octenyl-alanine olefin amino acid connected by an all-carbon crosslinker comprising one double bond
  misc_feature (4)..(11): Crosslink between residues
  MOD_RES (11)..(11): Alpha-Me S5-pentenyl-alanine olefin amino acid connected by an all-carbon crosslinker comprising one double bond
  MOD_RES (14)..(14): Norleucine
  MOD_RES (15)..(15): Sarcosine
  C-term NH2
LTFAAYWAQLAAALX

SEQ ID NO: 1201 - protein, 16 aa, Artificial Sequence
  Description of Artificial Sequence: Synthetic peptide
  N-term Ac
  MOD_RES (4)..(4): Alpha-Me R8-octenyl-alanine olefin amino acid connected by an all-carbon crosslinker comprising one double bond
  misc_feature (4)..(11): Crosslink between residues
  MOD_RES (11)..(11): Alpha-Me S5-pentenyl-alanine olefin amino acid connected by an all-carbon crosslinker comprising one double bond
  MOD_RES (14)..(14): Norleucine
  MOD_RES (16)..(16): 2-aminoisobutyric acid
  C-term NH2
LTFAAYWAQLAAALAX

SEQ ID NO: 1202 - protein, 16 aa, Artificial Sequence
  Description of Artificial Sequence: Synthetic peptide
  N-term Ac
  MOD_RES (4)..(4): Alpha-Me R8-octenyl-alanine olefin amino acid connected by an all-carbon crosslinker comprising one double bond
  misc_feature (4)..(11): Crosslink between residues
  MOD_RES (11)..(11): Alpha-Me S5-pentenyl-alanine olefin amino acid connected by an all-carbon crosslinker comprising one double bond
  MOD_RES (14)..(14): Norleucine
  MOD_RES (16)..(16): 2-aminoisobutyric acid
  C-term NH2
LTFAAYWAQLAAALAX

SEQ ID NO: 1203 - protein, 16 aa, Artificial Sequence
  Description of Artificial Sequence: Synthetic peptide
  N-term Ac
  MOD_RES (4)..(4): Alpha-Me R8-octenyl-alanine olefin amino acid connected by an all-carbon crosslinker comprising one double bond
  misc_feature (4)..(11): Crosslink between residues
  MOD_RES (11)..(11): Alpha-Me S5-pentenyl-alanine olefin amino acid connected by an all-carbon crosslinker comprising one double bond
  MOD_RES (14)..(14): Norleucine
  MOD_RES (16)..(16): N-methyl-Ala
  C-term NH2
LTFAAYWAQLAAALAA

SEQ ID NO: 1204 - protein, 16 aa, Artificial Sequence
  Description of Artificial Sequence: Synthetic peptide
  N-term Ac
  MOD_RES (4)..(4): Alpha-Me R8-octenyl-alanine olefin amino acid connected by an all-carbon crosslinker comprising one double bond
  misc_feature (4)..(11): Crosslink between residues
  MOD_RES (11)..(11): Alpha-Me S5-pentenyl-alanine olefin amino acid connected by an all-carbon crosslinker comprising one double bond
  MOD_RES (14)..(14): Norleucine
  MOD_RES (16)..(16): N-methyl-Ala
  C-term NH2
LTFAAYWAQLAAALAA

SEQ ID NO: 1205 - protein, 16 aa, Artificial Sequence
  Description of Artificial Sequence: Synthetic peptide
  N-term Ac
  MOD_RES (4)..(4): Alpha-Me R8-octenyl-alanine olefin amino acid connected by an all-carbon crosslinker comprising one double bond
  misc_feature (4)..(11): Crosslink between residues
  MOD_RES (11)..(11): Alpha-Me S5-pentenyl-alanine olefin amino acid connected by an all-carbon crosslinker comprising one double bond
  MOD_RES (14)..(14): Norleucine
  MOD_RES (16)..(16): D-amino acid
  C-term NH2
LTFAAYWAQLAAALAA

SEQ ID NO: 1206 - protein, 16 aa, Artificial Sequence
  Description of Artificial Sequence: Synthetic peptide
  N-term Ac
  MOD_RES (4)..(4): Alpha-Me R8-octenyl-alanine olefin amino acid connected by an all-carbon crosslinker comprising one double bond
  misc_feature (4)..(11): Crosslink between residues
  MOD_RES (11)..(11): Alpha-Me S5-pentenyl-alanine olefin amino acid connected by an all-carbon crosslinker comprising one double bond
  MOD_RES (14)..(14): Norleucine
  MOD_RES (16)..(16): D-amino acid
  C-term NH2
LTFAAYWAQLAAALAA

SEQ ID NO: 1207 - protein, 16 aa, Artificial Sequence
  Description of Artificial Sequence: Synthetic peptide
  N-term Ac
  MOD_RES (4)..(4): Alpha-Me R8-octenyl-alanine olefin amino acid connected by an all-carbon crosslinker comprising one double bond
  misc_feature (4)..(11): Crosslink between residues
  MOD_RES (11)..(11): Alpha-Me S5-pentenyl-alanine olefin amino acid connected by an all-carbon crosslinker comprising one double bond
  MOD_RES (14)..(14): Norleucine
  MOD_RES (16)..(16): Sarcosine
  C-term NH2
LTFAAYWAQLAAALAX

SEQ ID NO: 1208 - protein, 16 aa, Artificial Sequence
  Description of Artificial Sequence: Synthetic peptide
  N-term Ac
  MOD_RES (4)..(4): Alpha-Me R8-octenyl-alanine olefin amino acid connected by an all-carbon crosslinker comprising one double bond
  misc_feature (4)..(11): Crosslink between residues
  MOD_RES (11)..(11): Alpha-Me S5-pentenyl-alanine olefin amino acid connected by an all-carbon crosslinker comprising one double bond
  MOD_RES (14)..(14): Norleucine
  MOD_RES (16)..(16): Sarcosine
  C-term NH2
LTFAAYWAQLAAALAX

SEQ ID NO: 1209 - protein, 15 aa, Artificial Sequence
  Description of Artificial Sequence: Synthetic peptide
  N-term Ac
  MOD_RES (4)..(4): Alpha-Me R8-octenyl-alanine olefin amino acid that is not connected by a crosslinker
  MOD_RES (11)..(11): Alpha-Me S5-pentenyl-alanine olefin amino acid that is not connected by a crosslinker
  MOD_RES (14)..(14): Norleucine
  C-term NH2
LTFAAYWAQLAAALA

SEQ ID NO: 1210 - protein, 15 aa, Artificial Sequence
  Description of Artificial Sequence: Synthetic peptide
  N-term Ac
  MOD_RES (4)..(4): 2-aminoisobutyric acid
  MOD_RES (11)..(11): 2-aminoisobutyric acid
  MOD_RES (14)..(14): Norleucine
  C-term NH2
LTFXAYWAQLXAALA

SEQ ID NO: 1211 - protein, 15 aa, Artificial Sequence
  Description of Artificial Sequence: Synthetic peptide
  N-term Ac
  MOD_RES (4)..(4): Alpha-Me R8-octenyl-alanine olefin amino acid connected by an all-carbon crosslinker comprising one double bond
  misc_feature (4)..(11): Crosslink between residues
  MOD_RES (5)..(5): Cou4
  MOD_RES (11)..(11): Alpha-Me S5-pentenyl-alanine olefin amino acid connected by an all-carbon crosslinker comprising one double bond
  MOD_RES (14)..(14): Norleucine
  C-term NH2
LTFAXYWAQLAAALA

SEQ ID NO: 1212 - protein, 15 aa, Artificial Sequence
  Description of Artificial Sequence: Synthetic peptide
  N-term Ac
  MOD_RES (4)..(4): Alpha-Me R8-octenyl-alanine olefin amino acid connected by an all-carbon crosslinker comprising one double bond
  misc_feature (4)..(11): Crosslink between residues
  MOD_RES (5)..(5): Cou4
  MOD_RES (11)..(11): Alpha-Me S5-pentenyl-alanine olefin amino acid connected by an all-carbon crosslinker comprising one double bond
  MOD_RES (14)..(14): Norleucine
  C-term NH2
LTFAXYWAQLAAALA

SEQ ID NO: 1213 - protein, 15 aa, Artificial Sequence
  Description of Artificial Sequence: Synthetic peptide
  N-term Ac
  MOD_RES (4)..(4): Alpha-Me R8-octenyl-alanine olefin amino acid connected by an all-carbon crosslinker comprising one double bond
  misc_feature (4)..(11): Crosslink between residues
  MOD_RES (8)..(8): Cou4
  MOD_RES (11)..(11): Alpha-Me S5-pentenyl-alanine olefin amino acid connected by an all-carbon crosslinker comprising one double bond
  MOD_RES (14)..(14): Norleucine
  C-term NH2
LTFAAYWXQLAAALA

SEQ ID NO: 1214 - protein, 15 aa, Artificial Sequence
  Description of Artificial Sequence: Synthetic peptide
  N-term Ac
  MOD_RES (4)..(4): Alpha-Me R8-octenyl-alanine olefin amino acid connected by an all-carbon crosslinker comprising one double bond
  misc_feature (4)..(11): Crosslink between residues
  MOD_RES (11)..(11): Alpha-Me S5-pentenyl-alanine olefin amino acid connected by an all-carbon crosslinker comprising one double bond
  MOD_RES (12)..(12): Cou4
  MOD_RES (14)..(14): Norleucine
  C-term NH2
LTFAAYWAQLAXALA

SEQ ID NO: 1215 - protein, 15 aa, Artificial Sequence
  Description of Artificial Sequence: Synthetic peptide
  N-term Ac
  MOD_RES (4)..(4): Alpha-Me R8-octenyl-alanine olefin amino acid connected by an all-carbon crosslinker comprising one double bond
  misc_feature (4)..(11): Crosslink between residues
  MOD_RES (11)..(11): Alpha-Me S5-pentenyl-alanine olefin amino acid connected by an all-carbon crosslinker comprising one double bond
  MOD_RES (12)..(12): Cou4
  MOD_RES (14)..(14): Norleucine
  C-term NH2
LTFAAYWAQLAXALA

SEQ ID NO: 1216 - protein, 15 aa, Artificial Sequence
  Description of Artificial Sequence: Synthetic peptide
  N-term Ac
  MOD_RES (4)..(4): Alpha-Me R8-octenyl-alanine olefin amino acid connected by an all-carbon crosslinker comprising one double bond
  misc_feature (4)..(11): Crosslink between residues
  MOD_RES (11)..(11): Alpha-Me S5-pentenyl-alanine olefin amino acid connected by an all-carbon crosslinker comprising one double bond
  MOD_RES (13)..(13): Cou4
  MOD_RES (14)..(14): Norleucine
  C-term NH2
LTFAAYWAQLAAXLA

SEQ ID NO: 1217 - protein, 15 aa, Artificial Sequence
  Description of Artificial Sequence: Synthetic peptide
  N-term Ac
  MOD_RES (4)..(4): Alpha-Me R8-octenyl-alanine olefin amino acid connected by an all-carbon crosslinker comprising one double bond
  misc_feature (4)..(11): Crosslink between residues
  MOD_RES (11)..(11): Alpha-Me S5-pentenyl-alanine olefin amino acid connected by an all-carbon crosslinker comprising one double bond
  MOD_RES (13)..(13): Cou4
  MOD_RES (14)..(14): Norleucine
  C-term NH2
LTFAAYWAQLAAXLA

SEQ ID NO: 1218 - protein, 15 aa, Artificial Sequence
  Description of Artificial Sequence: Synthetic peptide
  N-term Ac
  MOD_RES (4)..(4): Alpha-Me R8-octenyl-alanine olefin amino acid connected by an all-carbon crosslinker comprising one double bond
  misc_feature (4)..(11): Crosslink between residues
  MOD_RES (11)..(11): Alpha-Me S5-pentenyl-alanine olefin amino acid connected by an all-carbon crosslinker comprising one double bond
  MOD_RES (14)..(14): Norleucine
  C-term OH
LTFAAYWAQLAAALA

SEQ ID NO: 1219 - protein, 15 aa, Artificial Sequence
  Description of Artificial Sequence: Synthetic peptide
  N-term Ac
  MOD_RES (4)..(4): Alpha-Me R8-octenyl-alanine olefin amino acid connected by an all-carbon crosslinker comprising one double bond
  misc_feature (4)..(11): Crosslink between residues
  MOD_RES (11)..(11): Alpha-Me S5-pentenyl-alanine olefin amino acid connected by an all-carbon crosslinker comprising one double bond
  MOD_RES (14)..(14): Norleucine
  C-term OH
LTFAAYWAQLAAALA

SEQ ID NO: 1220 - protein, 15 aa, Artificial Sequence
  Description of Artificial Sequence: Synthetic peptide
  N-term Ac
  MOD_RES (4)..(4): Alpha-Me R8-octenyl-alanine olefin amino acid connected by an all-carbon crosslinker comprising one double bond
  misc_feature (4)..(11): Crosslink between residues
  MOD_RES (11)..(11): Alpha-Me S5-pentenyl-alanine olefin amino acid connected by an all-carbon crosslinker comprising one double bond
  MOD_RES (14)..(14): Norleucine
  C-term NHnPr
LTFAAYWAQLAAALA

SEQ ID NO: 1221 - protein, 15 aa, Artificial Sequence
  Description of Artificial Sequence: Synthetic peptide
  N-term Ac
  MOD_RES (4)..(4): Alpha-Me R8-octenyl-alanine olefin amino acid connected by an all-carbon crosslinker comprising one double bond
  misc_feature (4)..(11): Crosslink between residues
  MOD_RES (11)..(11): Alpha-Me S5-pentenyl-alanine olefin amino acid connected by an all-carbon crosslinker comprising one double bond
  MOD_RES (14)..(14): Norleucine
  C-term NHnPr
LTFAAYWAQLAAALA

SEQ ID NO: 1222 - protein, 15 aa, Artificial Sequence
  Description of Artificial Sequence: Synthetic peptide
  N-term Ac
  MOD_RES (4)..(4): Alpha-Me R8-octenyl-alanine olefin amino acid connected by an all-carbon crosslinker comprising one double bond
  misc_feature (4)..(11): Crosslink between residues
  MOD_RES (11)..(11): Alpha-Me S5-pentenyl-alanine olefin amino acid connected by an all-carbon crosslinker comprising one double bond
  MOD_RES (14)..(14): Norleucine
  C-term NHnBu33Me
LTFAAYWAQLAAALA

SEQ ID NO: 1223 - protein, 15 aa, Artificial Sequence
  Description of Artificial Sequence: Synthetic peptide
  N-term Ac
  MOD_RES (4)..(4): Alpha-Me R8-octenyl-alanine olefin amino acid connected by an all-carbon crosslinker comprising one double bond
  misc_feature (4)..(11): Crosslink between residues
  MOD_RES (11)..(11): Alpha-Me S5-pentenyl-alanine olefin amino acid connected by an all-carbon crosslinker comprising one double bond
  MOD_RES (14)..(14): Norleucine
  C-term NHnBu33Me
LTFAAYWAQLAAALA

SEQ ID NO: 1224 - protein, 15 aa, Artificial Sequence
  Description of Artificial Sequence: Synthetic peptide
  N-term Ac
  MOD_RES (4)..(4): Alpha-Me R8-octenyl-alanine olefin amino acid connected by an all-carbon crosslinker comprising one double bond
  misc_feature (4)..(11): Crosslink between residues
  MOD_RES (11)..(11): Alpha-Me S5-pentenyl-alanine olefin amino acid connected by an all-carbon crosslinker comprising one double bond
  MOD_RES (14)..(14): Norleucine
  C-term NHHex
LTFAAYWAQLAAALA

SEQ ID NO: 1225 - protein, 15 aa, Artificial Sequence
  Description of Artificial Sequence: Synthetic peptide
  N-term Ac
  MOD_RES (4)..(4): Alpha-Me R8-octenyl-alanine olefin amino acid connected by an all-carbon crosslinker comprising one double bond
  misc_feature (4)..(11): Crosslink between residues
  MOD_RES (11)..(11): Alpha-Me S5-pentenyl-alanine olefin amino acid connected by an all-carbon crosslinker comprising one double bond
  MOD_RES (14)..(14): Norleucine
  C-term NHHex
LTFAAYWAQLAAALA

SEQ ID NO: 1226 - protein, 15 aa, Artificial Sequence
  Description of Artificial Sequence: Synthetic peptide
  N-term Ac
  MOD_RES (4)..(4): Alpha-Me R8-octenyl-alanine olefin amino acid connected by an all-carbon crosslinker comprising one double bond
  misc_feature (4)..(11): Crosslink between residues
  MOD_RES (11)..(11): Alpha-Me S5-pentenyl-alanine olefin amino acid connected by an all-carbon crosslinker comprising one double bond
  MOD_RES (14)..(14): Norleucine
  C-term NH2
LTAAAYWAQLAAALA

SEQ ID NO: 1227 - protein, 15 aa, Artificial Sequence
  Description of Artificial Sequence: Synthetic peptide
  N-term Ac
  MOD_RES (3)..(3): hLeu
  MOD_RES (4)..(4): Alpha-Me R8-octenyl-alanine olefin amino acid connected by an all-carbon crosslinker comprising one double bond
  misc_feature (4)..(11): Crosslink between residues
  MOD_RES (11)..(11): Alpha-Me S5-pentenyl-alanine olefin amino acid connected by an all-carbon crosslinker comprising one double bond
  MOD_RES (14)..(14): Norleucine
  C-term NH2
LTLAAYWAQLAAALA

SEQ ID NO: 1228 - protein, 15 aa, Artificial Sequence
  Description of Artificial Sequence: Synthetic peptide
  N-term Ac
  MOD_RES (4)..(4): Alpha-Me R8-octenyl-alanine olefin amino acid connected by an all-carbon crosslinker comprising one double bond
  misc_feature (4)..(11): Crosslink between residues
  MOD_RES (11)..(11): Alpha-Me S5-pentenyl-alanine olefin amino acid connected by an all-carbon crosslinker comprising one double bond
  MOD_RES (14)..(14): Norleucine
  C-term NH2
LTFAAYAAQLAAALA

SEQ ID NO: 1229 - protein, 15 aa, Artificial Sequence
  Description of Artificial Sequence: Synthetic peptide
  N-term Ac
  MOD_RES (4)..(4): Alpha-Me R8-octenyl-alanine olefin amino acid connected by an all-carbon crosslinker comprising one double bond
  misc_feature (4)..(11): Crosslink between residues
  MOD_RES (7)..(7): 2-Naphthalanine
  MOD_RES (11)..(11): Alpha-Me S5-pentenyl-alanine olefin amino acid connected by an all-carbon crosslinker comprising one double bond
  MOD_RES (14)..(14): Norleucine
  C-term NH2
LTFAAYAAQLAAALA

SEQ ID NO: 1230 - protein, 14 aa, Artificial Sequence
  Description of Artificial Sequence: Synthetic peptide
  N-term Ac
  MOD_RES (4)..(4): Alpha-Me R8-octenyl-alanine olefin amino acid connected by an all-carbon crosslinker comprising one double bond
  misc_feature (4)..(11): Crosslink between residues
  MOD_RES (8)..(8): Cou4
  MOD_RES (10)..(10): Cyclobutyl-Ala
  MOD_RES (11)..(11): Alpha-Me S5-pentenyl-alanine olefin amino acid connected by an all-carbon crosslinker comprising one double bond
  C-term NH2
LTFAEYWXQAASAA

SEQ ID NO: 1231 - protein, 14 aa, Artificial Sequence
  Description of Artificial Sequence: Synthetic peptide
  N-term Ac
  MOD_RES (4)..(4): Alpha-Me R8-octenyl-alanine olefin amino acid connected by an all-carbon crosslinker comprising one double bond
  misc_feature (4)..(11): Crosslink between residues
  MOD_RES (8)..(8): Cou7
  MOD_RES (10)..(10): Cyclobutyl-Ala
  MOD_RES (11)..(11): Alpha-Me S5-pentenyl-alanine olefin amino acid connected by an all-carbon crosslinker comprising one double bond
  C-term NH2
LTFAEYWXQAASAA

SEQ ID NO: 1232 - protein, 14 aa, Artificial Sequence
  Description of Artificial Sequence: Synthetic peptide
  N-term Ac
  MOD_RES (4)..(4): Alpha-Me R8-octenyl-alanine olefin amino acid connected by an all-carbon crosslinker comprising no double bonds
  misc_feature (4)..(11): Crosslink between residues
  MOD_RES (10)..(10): Cyclobutyl-Ala
  MOD_RES (11)..(11): Alpha-Me S5-pentenyl-alanine olefin amino acid connected by an all-carbon saturated crosslinker comprising no double bonds
  C-term NH2
LTFAEYWAQAASAA

SEQ ID NO: 1233 - protein, 14 aa, Artificial Sequence
  Description of Artificial Sequence: Synthetic peptide
  N-term Dmaac
  MOD_RES (4)..(4): Alpha-Me R8-octenyl-alanine olefin amino acid connected by an all-carbon crosslinker comprising one double bond
  misc_feature (4)..(11): Crosslink between residues
  MOD_RES (10)..(10): Cyclobutyl-Ala
  MOD_RES (11)..(11): Alpha-Me S5-pentenyl-alanine olefin amino acid connected by an all-carbon crosslinker comprising one double bond
  C-term NH2
LTFAEYWAQAASAA

SEQ ID NO: 1234 - protein, 17 aa, Artificial Sequence
  Description of Artificial Sequence: Synthetic peptide
  N-term Dmaac
  MOD_RES (4)..(4): Alpha-Me R8-octenyl-alanine olefin amino acid connected by an all-carbon crosslinker comprising one double bond
  misc_feature (4)..(11): Crosslink between residues
  MOD_RES (11)..(11): Alpha-Me S5-pentenyl-alanine olefin amino acid connected by an all-carbon crosslinker comprising one double bond
  MOD_RES (17)..(17): D-amino acid
  C-term NH2
LTFAAYWAQLAAAAAAA

SEQ ID NO: 1235 - protein, 17 aa, Artificial Sequence
  Description of Artificial Sequence: Synthetic peptide
  N-term Dmaac
  MOD_RES (4)..(4): Alpha-Me R8-octenyl-alanine olefin amino acid connected by an all-carbon crosslinker comprising one double bond
  misc_feature (4)..(11): Crosslink between residues
  MOD_RES (11)..(11): Alpha-Me S5-pentenyl-alanine olefin amino acid connected by an all-carbon crosslinker comprising one double bond
  MOD_RES (17)..(17): D-amino acid
  C-term NH2
LTFAAYWAQLAAAAAAA

SEQ ID NO: 1236 - protein, 17 aa, Artificial Sequence
  Description of Artificial Sequence: Synthetic peptide
  N-term Dmaac
  MOD_RES (4)..(4): Alpha-Me R8-octenyl-alanine olefin amino acid connected by an all-carbon crosslinker comprising one double bond
  misc_feature (4)..(11): Crosslink between residues
  MOD_RES (11)..(11): Alpha-Me S5-pentenyl-alanine olefin amino acid connected by an all-carbon crosslinker comprising one double bond
  MOD_RES (17)..(17): D-amino acid
  C-term NH2
LTFAEYWAQLAAAAAAA

SEQ ID NO: 1237 - protein, 17 aa, Artificial Sequence
  Description of Artificial Sequence: Synthetic peptide
  N-term Dmaac
  MOD_RES (4)..(4): Alpha-Me R8-octenyl-alanine olefin amino acid connected by an all-carbon crosslinker comprising one double bond
  misc_feature (4)..(11): Crosslink between residues
  MOD_RES (11)..(11): Alpha-Me S5-pentenyl-alanine olefin amino acid connected by an all-carbon crosslinker comprising one double bond
  MOD_RES (17)..(17): D-amino acid
  C-term NH2
LTFAEYWAQLAAAAAAA

SEQ ID NO: 1238 - protein, 15 aa, Artificial Sequence
  Description of Artificial Sequence: Synthetic peptide
  N-term Dmaac
  MOD_RES (4)..(4): Alpha-Me R8-octenyl-alanine olefin amino acid connected by an all-carbon crosslinker comprising one double bond
  misc_feature (4)..(11): Crosslink between residues
  MOD_RES (6)..(6): 4-carboxy Phe
  MOD_RES (10)..(10): Cyclobutyl-Ala
  MOD_RES (11)..(11): Alpha-Me S5-pentenyl-alanine olefin amino acid connected by an all-carbon crosslinker comprising one double bond
  MOD_RES (15)..(15): D-amino acid
  C-term NH2
LTFAEFWAQAAAAIA

SEQ ID NO: 1239 - protein, 15 aa, Artificial Sequence
  Description of Artificial Sequence: Synthetic peptide
  N-term Dmaac
  MOD_RES (4)..(4): Alpha-Me R8-octenyl-alanine olefin amino acid connected by an all-carbon crosslinker comprising one double bond
  misc_feature (4)..(11): Crosslink between residues
  MOD_RES (6)..(6): 4-carboxy Phe
  MOD_RES (10)..(10): Cyclobutyl-Ala
  MOD_RES (11)..(11): Alpha-Me S5-pentenyl-alanine olefin amino acid connected by an all-carbon crosslinker comprising one double bond
  MOD_RES (15)..(15): D-amino acid
  C-term NH2
LTFAEFWAQAAAAIA

SEQ ID NO: 1240 - protein, 15 aa, Artificial Sequence
  Description of Artificial Sequence: Synthetic peptide
  N-term Dmaac
  MOD_RES (4)..(4): Alpha-Me R8-octenyl-alanine olefin amino acid connected by an all-carbon crosslinker comprising one double bond
  misc_feature (4)..(11): Crosslink between residues
  MOD_RES (11)..(11): Alpha-Me S5-pentenyl-alanine olefin amino acid connected by an all-carbon crosslinker comprising one double bond
  MOD_RES (14)..(14): Norleucine
  C-term NH2
LTFAAYWAQLAAALA

SEQ ID NO: 1241 - protein, 15 aa, Artificial Sequence
  Description of Artificial Sequence: Synthetic peptide
  N-term Dmaac
  MOD_RES (4)..(4): Alpha-Me R8-octenyl-alanine olefin amino acid connected by an all-carbon crosslinker comprising one double bond
  misc_feature (4)..(11): Crosslink between residues
  MOD_RES (11)..(11): Alpha-Me S5-pentenyl-alanine olefin amino acid connected by an all-carbon crosslinker comprising one double bond
  MOD_RES (14)..(14): Norleucine
  C-term NH2
LTFAAYWAQLAAALA

SEQ ID NO: 1242 - protein, 15 aa, Artificial Sequence
  Description of Artificial Sequence: Synthetic peptide
  N-term Ac
  MOD_RES (4)..(4): Alpha-Me R8-octenyl-alanine olefin amino acid connected by an all-carbon crosslinker comprising no double bonds
  misc_feature (4)..(11): Crosslink between residues
  MOD_RES (11)..(11): Alpha-Me S5-pentenyl-alanine olefin amino acid connected by an all-carbon crosslinker comprising no double bonds
  MOD_RES (14)..(14): Norleucine
  C-term NH2
LTFAAYWAQLAAALA

SEQ ID NO: 1243 - protein, 17 aa, Artificial Sequence
  Description of Artificial Sequence: Synthetic peptide
  N-term Ac
  MOD_RES (4)..(4): Alpha-Me R8-octenyl-alanine olefin amino acid connected by an all-carbon crosslinker comprising no double bonds
  misc_feature (4)..(11): Crosslink between residues
  MOD_RES (11)..(11): Alpha-Me S5-pentenyl-alanine olefin amino acid connected by an all-carbon crosslinker comprising no double bonds
  MOD_RES (17)..(17): D-amino acid
  C-term NH2
LTFAEYWAQLAAAAAAA

SEQ ID NO: 1244 - protein, 16 aa, Artificial Sequence
  Description of Artificial Sequence: Synthetic peptide
  MOD_RES (1)..(1): Cou6
  MOD_RES (2)..(2): Beta-Ala
  MOD_RES (6)..(6): Alpha-Me R8-octenyl-alanine olefin amino acid connected by an all-carbon crosslinker comprising one double bond
  misc_feature (6)..(13): Crosslink between residues
  MOD_RES (12)..(12): hLeu
  MOD_RES (13)..(13): Alpha-Me S5-pentenyl-alanine olefin amino acid connected by an all-carbon crosslinker comprising one double bond
  C-term NH2
XALTFAEYWAQLASAA

SEQ ID NO: 1245 - protein, 16 aa, Artificial Sequence
  Description of Artificial Sequence: Synthetic peptide
  MOD_RES (1)..(1): Cou8
  MOD_RES (2)..(2): Beta-Ala
  MOD_RES (6)..(6): Alpha-Me R8-octenyl-alanine olefin amino acid connected by an all-carbon crosslinker comprising one double bond
  misc_feature (6)..(13): Crosslink between residues
  MOD_RES (12)..(12): hLeu
  MOD_RES (13)..(13): Alpha-Me S5-pentenyl-alanine olefin amino acid connected by an all-carbon crosslinker comprising one double bond
  C-term NH2
XALTFAEYWAQLASAA

SEQ ID NO: 1246 - protein, 17 aa, Artificial Sequence
  Description of Artificial Sequence: Synthetic peptide
  N-term Ac
  MOD_RES (3)..(3): 4-iodo-Phe
  MOD_RES (4)..(4): Alpha-Me R8-octenyl-alanine olefin amino acid connected by an all-carbon crosslinker comprising one double bond
  misc_feature (4)..(11): Crosslink between residues
  MOD_RES (11)..(11): Alpha-Me S5-pentenyl-alanine olefin amino acid connected by an all-carbon crosslinker comprising one double bond
  MOD_RES (17)..(17): D-amino acid
  C-term NH2
LTFAEYWAQLAAAAAAA

SEQ ID NO: 1247 - protein, 17 aa, Artificial Sequence
  Description of Artificial Sequence: Synthetic peptide
  N-term Ac
  MOD_RES (4)..(4): Alpha-Me R8-octenyl-alanine olefin amino acid connected by an all-carbon crosslinker comprising one double bond
  misc_feature (4)..(11): Crosslink between residues
  MOD_RES (11)..(11): Alpha-Me S5-pentenyl-alanine olefin amino acid connected by an all-carbon crosslinker comprising one double bond
  MOD_RES (17)..(17): D-amino acid
  C-term NH2
LTFAEYWAQLAAAAAAA

SEQ ID NO: 1248 - protein, 17 aa, Artificial Sequence
  Description of Artificial Sequence: Synthetic peptide
  N-term Ac
  MOD_RES (4)..(4): Alpha-Me R8-octenyl-alanine olefin amino acid connected by an all-carbon crosslinker comprising one double bond
  misc_feature (4)..(11): Crosslink between residues
  MOD_RES (11)..(11): Alpha-Me S5-pentenyl-alanine olefin amino acid connected by an all-carbon crosslinker comprising one double bond
  MOD_RES (17)..(17): D-amino acid
  C-term OH
LTFAEYWAQLAAAAAAA

SEQ ID NO: 1249 - protein, 17 aa, Artificial Sequence
  Description of Artificial Sequence: Synthetic peptide
  N-term Ac
  MOD_RES (4)..(4): Alpha-Me R8-octenyl-alanine olefin amino acid connected by an all-carbon crosslinker comprising one double bond
  misc_feature (4)..(11): Crosslink between residues
  MOD_RES (11)..(11): Alpha-Me S5-pentenyl-alanine olefin amino acid connected by an all-carbon crosslinker comprising one double bond
  MOD_RES (17)..(17): D-amino acid
  C-term OH
LTFAEYWAQLAAAAAAA

SEQ ID NO: 1250 - protein, 17 aa, Artificial Sequence
  Description of Artificial Sequence: Synthetic peptide
  N-term Ac
  MOD_RES (4)..(4): Alpha-Me R8-octenyl-alanine olefin amino acid connected by an all-carbon crosslinker comprising one double bond
  misc_feature (4)..(11): Crosslink between residues
  MOD_RES (11)..(11): Alpha-Me S5-pentenyl-alanine olefin amino acid connected by an all-carbon crosslinker comprising one double bond
  MOD_RES (17)..(17): D-amino acid
  C-term NH2
LTFAEYWAELAAAAAAA

SEQ ID NO: 1251 - protein, 17 aa, Artificial Sequence
  Description of Artificial Sequence: Synthetic peptide
  N-term Ac
  MOD_RES (4)..(4): Alpha-Me R8-octenyl-alanine olefin amino acid connected by an all-carbon crosslinker comprising one double bond
  misc_feature (4)..(11): Crosslink between residues
  MOD_RES (11)..(11): Alpha-Me S5-pentenyl-alanine olefin amino acid connected by an all-carbon crosslinker comprising one double bond
  MOD_RES (17)..(17): D-amino acid
  C-term NH2
LTFAEYWAELAAAAAAA

SEQ ID NO: 1252 - protein, 17 aa, Artificial Sequence
  Description of Artificial Sequence: Synthetic peptide
  N-term Ac
  MOD_RES (4)..(4): Alpha-Me R8-octenyl-alanine olefin amino acid connected by an all-carbon crosslinker comprising one double bond
  misc_feature (4)..(11): Crosslink between residues
  MOD_RES (11)..(11): Alpha-Me S5-pentenyl-alanine olefin amino acid connected by an all-carbon crosslinker comprising one double bond
  MOD_RES (17)..(17): D-amino acid
  C-term OH
LTFAEYWAELAAAAAAA

SEQ ID NO: 1253 - protein, 17 aa, Artificial Sequence
  Description of Artificial Sequence: Synthetic peptide
  N-term Ac
  MOD_RES (4)..(4): Alpha-Me R8-octenyl-alanine olefin amino acid connected by an all-carbon crosslinker comprising one double bond
  misc_feature (4)..(11): Crosslink between residues
  MOD_RES (7)..(7): 6cl-Trp
  MOD_RES (11)..(11): Alpha-Me S5-pentenyl-alanine olefin amino acid connected by an all-carbon crosslinker comprising one double bond
  MOD_RES (17)..(17): D-amino acid
  C-term NH2
LTFAEYWAQLAAAAAAA

SEQ ID NO: 1254 - protein, 17 aa, Artificial Sequence
  Description of Artificial Sequence: Synthetic peptide
  N-term Ac
  MOD_RES (4)..(4): Alpha-Me R8-octenyl-alanine olefin amino acid connected by an all-carbon crosslinker comprising one double bond
  misc_feature (4)..(11): Crosslink between residues
  MOD_RES (6)..(6): Phe-4bOH2
  MOD_RES (11)..(11): Alpha-Me S5-pentenyl-alanine olefin amino acid connected by an all-carbon crosslinker comprising one double bond
  MOD_RES (17)..(17): D-amino acid
  C-term NH2
LTFAEFWAQLAAAAAAA

SEQ ID NO: 1255 - protein, 20 aa, Artificial Sequence
  Description of Artificial Sequence: Synthetic peptide
  N-term Ac
  MOD_RES (7)..(7): Alpha-Me R8-octenyl-alanine olefin amino acid connected by an all-carbon crosslinker comprising one double bond
  misc_feature (7)..(14): Crosslink between residues
  MOD_RES (14)..(14): Alpha-Me S5-pentenyl-alanine olefin amino acid connected by an all-carbon crosslinker comprising one double bond
  MOD_RES (20)..(20): D-amino acid
  C-term NH2
AAALTFAEYWAQLAAAAAAA

SEQ ID NO: 1256 - protein, 17 aa, Artificial Sequence
  Description of Artificial Sequence: Synthetic peptide
  N-term Ac
  MOD_RES (3)..(3): 3,4-difluoro Phe
  MOD_RES (4)..(4): Alpha-Me R8-octenyl-alanine olefin amino acid connected by an all-carbon crosslinker comprising one double bond
  misc_feature (4)..(11): Crosslink between residues
  MOD_RES (11)..(11): Alpha-Me S5-pentenyl-alanine olefin amino acid connected by an all-carbon crosslinker comprising one double bond
  MOD_RES (17)..(17): D-amino acid
  C-term NH2
LTFAEYWAQLAAAAAAA

SEQ ID NO: 1257 - protein, 17 aa, Artificial Sequence
  Description of Artificial Sequence: Synthetic peptide
  N-term Ac
  MOD_RES (4)..(4): Alpha-Me R8-octenyl-alanine olefin amino acid connected by an all-carbon crosslinker comprising one double bond
  misc_feature (4)..(11): Crosslink between residues
  MOD_RES (11)..(11): Alpha-Me S5-pentenyl-alanine olefin amino acid connected by an all-carbon crosslinker comprising one double bond
  MOD_RES (17)..(17): D-amino acid
  C-term NH2
RTFAEYWAQLAAAAAAA

SEQ ID NO: 1258 - protein, 17 aa, Artificial Sequence
  Description of Artificial Sequence: Synthetic peptide
  N-term Ac
  MOD_RES (4)..(4): Alpha-Me R8-octenyl-alanine olefin amino acid connected by an all-carbon crosslinker comprising one double bond
  misc_feature (4)..(11): Crosslink between residues
  MOD_RES (11)..(11): Alpha-Me S5-pentenyl-alanine olefin amino acid connected by an all-carbon crosslinker comprising one double bond
  MOD_RES (17)..(17): D-amino acid
  C-term NH2
LTAAEYWAQLAAAAAAA

SEQ ID NO: 1259 - protein, 17 aa, Artificial Sequence
  Description of Artificial Sequence: Synthetic peptide
  N-term Ac
  MOD_RES (4)..(4): Alpha-Me R8-octenyl-alanine olefin amino acid connected by an all-carbon crosslinker comprising one double bond
  misc_feature (4)..(11): Crosslink between residues
  MOD_RES (8)..(8): 2-aminoisobutyric acid
  MOD_RES (11)..(11): Alpha-Me S5-pentenyl-alanine olefin amino acid connected by an all-carbon crosslinker comprising one double bond
  MOD_RES (17)..(17): D-amino acid
  C-term NH2
LTFAEYWXQLAAAAAAA

SEQ ID NO: 1260 - protein, 17 aa, Artificial Sequence
  Description of Artificial Sequence: Synthetic peptide
  N-term Ac
  MOD_RES (4)..(4): Alpha-Me R8-octenyl-alanine olefin amino acid connected by an all-carbon crosslinker comprising one double bond
  misc_feature (4)..(11): Crosslink between residues
  MOD_RES (11)..(11): Alpha-Me S5-pentenyl-alanine olefin amino acid connected by an all-carbon crosslinker comprising one double bond
  MOD_RES (13)..(13): 2-aminoisobutyric acid
  MOD_RES (17)..(17): D-amino acid
  C-term NH2
LTFAEYWAQLAAXAAAA

SEQ ID NO: 1261 - protein, 17 aa, Artificial Sequence
  Description of Artificial Sequence: Synthetic peptide
  N-term Ac
  MOD_RES (4)..(4): Alpha-Me R8-octenyl-alanine olefin amino acid connected by an all-carbon crosslinker comprising one double bond
  misc_feature (4)..(11): Crosslink between residues
  MOD_RES (11)..(11): Alpha-Me S5-pentenyl-alanine olefin amino acid connected by an all-carbon crosslinker comprising one double bond
  MOD_RES (14)..(14): 2-aminoisobutyric acid
  MOD_RES (17)..(17): D-amino acid
  C-term NH2
LTFAEYWAQLAAAXAAA

SEQ ID NO: 1262 - protein, 17 aa, Artificial Sequence
  Description of Artificial Sequence: Synthetic peptide
  N-term Ac
  MOD_RES (4)..(4): Alpha-Me R8-octenyl-alanine olefin amino acid connected by an all-carbon crosslinker comprising one double bond
  misc_feature (4)..(11): Crosslink between residues
  MOD_RES (11)..(11): Alpha-Me S5-pentenyl-alanine olefin amino acid connected by an all-carbon crosslinker comprising one double bond
  MOD_RES (15)..(15): 2-aminoisobutyric acid
  MOD_RES (17)..(17): D-amino acid
  C-term NH2
LTFAEYWAQLAAAAXAA

SEQ ID NO: 1263 - protein, 17 aa, Artificial Sequence
  Description of Artificial Sequence: Synthetic peptide
  N-term Ac
  MOD_RES (4)..(4): Alpha-Me R8-octenyl-alanine olefin amino acid connected by an all-carbon crosslinker comprising one double bond
  misc_feature (4)..(11): Crosslink between residues
  MOD_RES (11)..(11): Alpha-Me S5-pentenyl-alanine olefin amino acid connected by an all-carbon crosslinker comprising one double bond
  MOD_RES (16)..(16): 2-aminoisobutyric acid
  MOD_RES (17)..(17): D-amino acid
  C-term NH2
LTFAEYWAQLAAAAAXA

SEQ ID NO: 1264 - protein, 17 aa, Artificial Sequence
  Description of Artificial Sequence: Synthetic peptide
  N-term Ac
  MOD_RES (4)..(4): Alpha-Me R8-octenyl-alanine olefin amino acid connected by an all-carbon crosslinker comprising one double bond
  misc_feature (4)..(11): Crosslink between residues
  MOD_RES (11)..(11): Alpha-Me S5-pentenyl-alanine olefin amino acid connected by an all-carbon crosslinker comprising one double bond
  MOD_RES (16)..(16): 2-aminoisobutyric acid
  MOD_RES (17)..(17): D-amino acid
  C-term NH2
LTFAEYWAQLAAAAAXA

SEQ ID NO: 1265 - protein, 17 aa, Artificial Sequence
  Description of Artificial Sequence: Synthetic peptide
  N-term Ac
  MOD_RES (4)..(4): Alpha-Me R8-octenyl-alanine olefin amino acid connected by an all-carbon crosslinker comprising one double bond
  misc_feature (4)..(11): Crosslink between residues
  MOD_RES (11)..(11): Alpha-Me S5-pentenyl-alanine olefin amino acid connected by an all-carbon crosslinker comprising one double bond
  MOD_RES (17)..(17): 2-aminoisobutyric acid
  C-term NH2
LTFAEYWAQLAAAAAAX

SEQ ID NO: 1266 - protein, 17 aa, Artificial Sequence
  Description of Artificial Sequence: Synthetic peptide
  N-term Ac
  MOD_RES (4)..(4): Alpha-Me R8-octenyl-alanine olefin amino acid connected by an all-carbon crosslinker comprising one double bond
  misc_feature (4)..(11): Crosslink between residues
  MOD_RES (11)..(11): Alpha-Me S5-pentenyl-alanine olefin amino acid connected by an all-carbon crosslinker comprising one double bond
  MOD_RES (13)..(13): D-amino acid
  MOD_RES (17)..(17): D-amino acid
  C-term NH2
LTFAEYWAQLAAAAAAA

SEQ ID NO: 1267 - protein, 17 aa, Artificial Sequence
  Description of Artificial Sequence: Synthetic peptide
  N-term Ac
  MOD_RES (4)..(4): Alpha-Me R8-octenyl-alanine olefin amino acid connected by an all-carbon crosslinker comprising one double bond
  misc_feature (4)..(11): Crosslink between residues
  MOD_RES (11)..(11): Alpha-Me S5-pentenyl-alanine olefin amino acid connected by an all-carbon crosslinker comprising one double bond
  MOD_RES (14)..(14): D-amino acid
  MOD_RES (17)..(17): D-amino acid
  C-term NH2
LTFAEYWAQLAAAAAAA

SEQ ID NO: 1268 - protein, 17 aa, Artificial Sequence
  Description of Artificial Sequence: Synthetic peptide
  N-term Ac
  MOD_RES (4)..(4): Alpha-Me R8-octenyl-alanine olefin amino acid connected by an all-carbon crosslinker comprising one double bond
  misc_feature (4)..(11): Crosslink between residues
  MOD_RES (11)..(11): Alpha-Me S5-pentenyl-alanine olefin amino acid connected by an all-carbon crosslinker comprising one double bond
  MOD_RES (15)..(15): D-amino acid
  MOD_RES (17)..(17): D-amino acid
  C-term NH2
LTFAEYWAQLAAAAAAA

SEQ ID NO: 1269 - protein, 17 aa, Artificial Sequence
  Description of Artificial Sequence: Synthetic peptide
  N-term Ac
  MOD_RES (4)..(4): Alpha-Me R8-octenyl-alanine olefin amino acid connected by an all-carbon crosslinker comprising one double bond
  misc_feature (4)..(11): Crosslink between residues
  MOD_RES (11)..(11): Alpha-Me S5-pentenyl-alanine olefin amino acid connected by an all-carbon crosslinker comprising one double bond
  MOD_RES (15)..(15): D-amino acid
  MOD_RES (17)..(17): D-amino acid
  C-term NH2
LTFAEYWAQLAAAAAAA

SEQ ID NO: 1270 - protein, 17 aa, Artificial Sequence
  Description of Artificial Sequence: Synthetic peptide
  N-term Ac
  MOD_RES (4)..(4): Alpha-Me R8-octenyl-alanine olefin amino acid connected by an all-carbon crosslinker comprising one double bond
  misc_feature (4)..(11): Crosslink between residues
  MOD_RES (11)..(11): Alpha-Me S5-pentenyl-alanine olefin amino acid connected by an all-carbon crosslinker comprising one double bond
  MOD_RES (16)..(17): D-amino acid
  C-term NH2
LTFAEYWAQLAAAAAAA

SEQ ID NO: 1271 - protein, 17 aa, Artificial Sequence
  Description of Artificial Sequence: Synthetic peptide
  N-term Ac
  MOD_RES (4)..(4): Alpha-Me R8-octenyl-alanine olefin amino acid connected by an all-carbon crosslinker comprising one double bond
  misc_feature (4)..(11): Crosslink between residues
  MOD_RES (11)..(11): Alpha-Me S5-pentenyl-alanine olefin amino acid connected by an all-carbon crosslinker comprising one double bond
  C-term NH2
LTFAEYWAQLAAAAAAA

SEQ ID NO: 1272 - protein, 17 aa, Artificial Sequence
  Description of Artificial Sequence: Synthetic peptide
  N-term Ac
  MOD_RES (4)..(4): Alpha-Me R8-octenyl-alanine olefin amino acid connected by an all-carbon crosslinker comprising one double bond
  misc_feature (4)..(11): Crosslink between residues
  MOD_RES (11)..(11): Alpha-Me S5-pentenyl-alanine olefin amino acid connected by an all-carbon crosslinker comprising one double bond
  MOD_RES (13)..(13): Sarcosine
  MOD_RES (17)..(17): D-amino acid
  C-term NH2
LTFAEYWAQLAAXAAAA

SEQ ID NO: 1273 - protein, 17 aa, Artificial Sequence
  Description of Artificial Sequence: Synthetic peptide
  N-term Ac
  MOD_RES (4)..(4): Alpha-Me R8-octenyl-alanine olefin amino acid connected by an all-carbon crosslinker comprising one double bond
  misc_feature (4)..(11): Crosslink between residues
  MOD_RES (11)..(11): Alpha-Me S5-pentenyl-alanine olefin amino acid connected by an all-carbon crosslinker comprising one double bond
  MOD_RES (14)..(14): Sarcosine
  MOD_RES (17)..(17): D-amino acid
  C-term NH2
LTFAEYWAQLAAAXAAA

SEQ ID NO: 1274 - protein, 17 aa, Artificial Sequence
  Description of Artificial Sequence: Synthetic peptide
  N-term Ac
  MOD_RES (4)..(4): Alpha-Me R8-octenyl-alanine olefin amino acid connected by an all-carbon crosslinker comprising one double bond
  misc_feature (4)..(11): Crosslink between residues
  MOD_RES (11)..(11): Alpha-Me S5-pentenyl-alanine olefin amino acid connected by an all-carbon crosslinker comprising one double bond
  MOD_RES (15)..(15): Sarcosine
  MOD_RES (17)..(17): D-amino acid
  C-term NH2
LTFAEYWAQLAAAAXAA

SEQ ID NO: 1275 - protein, 17 aa, Artificial Sequence
  Description of Artificial Sequence: Synthetic peptide
  N-term Ac
  MOD_RES (4)..(4): Alpha-Me R8-octenyl-alanine olefin amino acid connected by an all-carbon crosslinker comprising one double bond
  misc_feature (4)..(11): Crosslink between residues
  MOD_RES (11)..(11): Alpha-Me S5-pentenyl-alanine olefin amino acid connected by an all-carbon crosslinker comprising one double bond
  MOD_RES (16)..(16): Sarcosine
  MOD_RES (17)..(17): D-amino acid
  C-term NH2
LTFAEYWAQLAAAAAXA

SEQ ID NO: 1276 - protein, 17 aa, Artificial Sequence
  Description of Artificial Sequence: Synthetic peptide
  N-term Ac
  MOD_RES (4)..(4): Alpha-Me R8-octenyl-alanine olefin amino acid connected by an all-carbon crosslinker comprising one double bond
  misc_feature (4)..(11): Crosslink between residues
  MOD_RES (11)..(11): Alpha-Me S5-pentenyl-alanine olefin amino acid connected by an all-carbon crosslinker comprising one double bond
  MOD_RES (17)..(17): Sarcosine
  C-term NH2
LTFAEYWAQLAAAAAAX

SEQ ID NO: 1277 - protein, 17 aa, Artificial Sequence
  Description of Artificial Sequence: Synthetic peptide
  N-term Ac
  MOD_RES (1)..(1): N15 isotopic-Leu
  MOD_RES (4)..(4): Alpha-Me R8-octenyl-alanine olefin amino acid connected by an all-carbon crosslinker comprising one double bond
  misc_feature (4)..(11): Crosslink between residues
  MOD_RES (11)..(11): Alpha-Me S5-pentenyl-alanine olefin amino acid connected by an all-carbon crosslinker comprising one double bond
  MOD_RES (17)..(17): D-amino acid
  C-term NH2
LTFAEYWAQLAAAAAAA

SEQ ID NO: 1278 - protein, 16 aa, Artificial Sequence
  Description of Artificial Sequence: Synthetic peptide
  N-term Ac
  MOD_RES (3)..(3): Alpha-Me R8-octenyl-alanine olefin amino acid connected by an all-carbon crosslinker comprising one double bond
  misc_feature (3)..(10): Crosslink between residues
  MOD_RES (10)..(10): Alpha-Me S5-pentenyl-alanine olefin amino acid connected by an all-carbon crosslinker comprising one double bond
  MOD_RES (16)..(16): D-amino acid
  C-term NH2
TFAEYWAQLAAAAAAA

SEQ ID NO: 1279 - protein, 15 aa, Artificial Sequence
  Description of Artificial Sequence: Synthetic peptide
  N-term Ac
  MOD_RES (2)..(2): Alpha-Me R8-octenyl-alanine olefin amino acid connected by an all-carbon crosslinker comprising one double bond
  misc_feature (2)..(9): Crosslink between residues
  MOD_RES (9)..(9): Alpha-Me S5-pentenyl-alanine olefin amino acid connected by an all-carbon crosslinker comprising one double bond
  MOD_RES (15)..(15): D-amino acid
  C-term NH2
FAEYWAQLAAAAAAA

SEQ ID NO: 1280 - protein, 17 aa, Artificial Sequence
  Description of Artificial Sequence: Synthetic peptide
  N-term Ac
  MOD_RES (4)..(4): Alpha-Me R8-octenyl-alanine olefin amino acid connected by an all-carbon crosslinker comprising one double bond
  misc_feature (4)..(11): Crosslink between residues
  MOD_RES (11)..(11): Alpha-Me S5-pentenyl-alanine olefin amino acid connected by an all-carbon crosslinker comprising one double bond
  MOD_RES (17)..(17): D-amino acid
  C-term NH2
LVFAEYWAQLAAAAAAA

SEQ ID NO: 1281 - protein, 17 aa, Artificial Sequence
  Description of Artificial Sequence: Synthetic peptide
  N-term Ac
  MOD_RES (4)..(4): Alpha-Me R8-octenyl-alanine olefin amino acid connected by an all-carbon crosslinker comprising one double bond
  misc_feature (4)..(11): Crosslink between residues
  MOD_RES (11)..(11): Alpha-Me S5-pentenyl-alanine olefin amino acid connected by an all-carbon crosslinker comprising one double bond
  MOD_RES (17)..(17): D-amino acid
  C-term NH2
AAFAEYWAQLAAAAAAA

SEQ ID NO: 1282 - protein, 16 aa, Artificial Sequence
  Description of Artificial Sequence: Synthetic peptide
  N-term Ac
  MOD_RES (4)..(4): Alpha-Me R8-octenyl-alanine olefin amino acid connected by an all-carbon crosslinker comprising one double bond
  misc_feature (4)..(11): Crosslink between residues
  MOD_RES (11)..(11): Alpha-Me S5-pentenyl-alanine olefin amino acid connected by an all-carbon crosslinker comprising one double bond
  MOD_RES (16)..(16): D-amino acid
  C-term NH2
LTFAEYWAQLAAAAAA

SEQ ID NO: 1283 - protein, 15 aa, Artificial Sequence
  Description of Artificial Sequence: Synthetic peptide
  N-term Ac
  MOD_RES (4)..(4): Alpha-Me R8-octenyl-alanine olefin amino acid connected by an all-carbon crosslinker comprising one double bond
  misc_feature (4)..(11): Crosslink between residues
  MOD_RES (11)..(11): Alpha-Me S5-pentenyl-alanine olefin amino acid connected by an all-carbon crosslinker comprising one double bond
  MOD_RES (15)..(15): D-amino acid
  C-term NH2
LTFAEYWAQLAAAAA

SEQ ID NO: 1284 - protein, 14 aa, Artificial Sequence
  Description of Artificial Sequence: Synthetic peptide
  N-term Ac
  MOD_RES (4)..(4): Alpha-Me R8-octenyl-alanine olefin amino acid connected by an all-carbon crosslinker comprising one double bond
  misc_feature (4)..(11): Crosslink between residues
  MOD_RES (11)..(11): Alpha-Me S5-pentenyl-alanine olefin amino acid connected by an all-carbon crosslinker comprising one double bond
  MOD_RES (14)..(14): D-amino acid
  C-term NH2
LTFAEYWAQLAAAA

SEQ ID NO: 1285 - protein, 13 aa, Artificial Sequence
  Description of Artificial Sequence: Synthetic peptide
  N-term Ac
  MOD_RES (4)..(4): Alpha-Me R8-octenyl-alanine olefin amino acid connected by an all-carbon crosslinker comprising one double bond
  misc_feature (4)..(11): Crosslink between residues
  MOD_RES (11)..(11): Alpha-Me S5-pentenyl-alanine olefin amino acid connected by an all-carbon crosslinker comprising one double bond
  MOD_RES (13)..(13): D-amino acid
  C-term NH2
LTFAEYWAQLAAA

SEQ ID NO: 1286 - protein, 12 aa, Artificial Sequence
  Description of Artificial Sequence: Synthetic peptide
  N-term Ac
  MOD_RES (4)..(4): Alpha-Me R8-octenyl-alanine olefin amino acid connected by an all-carbon crosslinker comprising one double bond
  misc_feature (4)..(11): Crosslink between residues
  MOD_RES (11)..(11): Alpha-Me S5-pentenyl-alanine olefin amino acid connected by an all-carbon crosslinker comprising one double bond
  MOD_RES (12)..(12): D-amino acid
  C-term NH2
LTFAEYWAQLAA

SEQ ID NO: 1287 - protein, 14 aa, Artificial Sequence
  Description of Artificial Sequence: Synthetic peptide
  N-term Ac
  MOD_RES (4)..(4): Alpha-Me R8-octenyl-alanine olefin amino acid connected by an all-carbon crosslinker comprising one double bond
  misc_feature (4)..(11): Crosslink between residues
  MOD_RES (11)..(11): Alpha-Me S5-pentenyl-alanine olefin amino acid connected by an all-carbon crosslinker comprising one double bond
  C-term OH
LTFAEYWAQLAAAA

SEQ ID NO: 1288 - protein, 12 aa, Artificial Sequence
  Description of Artificial Sequence: Synthetic peptide
  N-term Ac
  MOD_RES (4)..(4): Alpha-Me R8-octenyl-alanine olefin amino acid connected by an all-carbon crosslinker comprising one double bond
  misc_feature (4)..(11): Crosslink between residues
  MOD_RES (11)..(11): Alpha-Me S5-pentenyl-alanine olefin amino acid connected by an all-carbon crosslinker comprising one double bond
  C-term OH
LTFAEYWAQLAA

SEQ ID NO: 1289 - protein, 14 aa, Artificial Sequence
  Description of Artificial Sequence: Synthetic peptide
  N-term Ac
  MOD_RES (4)..(4): Alpha-Me R8-octenyl-alanine olefin amino acid connected by an all-carbon crosslinker comprising one double bond
  misc_feature (4)..(11): Crosslink between residues
  MOD_RES (11)..(11): Alpha-Me S5-pentenyl-alanine olefin amino acid connected by an all-carbon crosslinker comprising one double bond
  C-term NH2
LTFAEYWAQLAAAA

SEQ ID NO: 1290 - protein, 14 aa, Artificial Sequence
  Description of Artificial Sequence: Synthetic peptide
  N-term Ac
  MOD_RES (4)..(4): Alpha-Me R8-octenyl-alanine olefin amino acid connected by an all-carbon crosslinker comprising one double bond
  misc_feature (4)..(11): Crosslink between residues
  MOD_RES (10)..(10): Cyclobutyl-Ala
  MOD_RES (11)..(11): Alpha-Me S5-pentenyl-alanine olefin amino acid connected by an all-carbon crosslinker comprising one double bond
  C-term OH
LTFAEYWAQAASAA

SEQ ID NO: 1291 - protein, 12 aa, Artificial Sequence
  Description of Artificial Sequence: Synthetic peptide
  N-term Ac
  MOD_RES (4)..(4): Alpha-Me R8-octenyl-alanine olefin amino acid connected by an all-carbon crosslinker comprising one double bond
  misc_feature (4)..(11): Crosslink between residues
  MOD_RES (10)..(10): Cyclobutyl-Ala
  MOD_RES (11)..(11): Alpha-Me S5-pentenyl-alanine olefin amino acid connected by an all-carbon crosslinker comprising one double bond
  C-term OH
LTFAEYWAQAAS

SEQ ID NO: 1292 - protein, 12 aa, Artificial Sequence
  Description of Artificial Sequence: Synthetic peptide
  N-term Ac
  MOD_RES (4)..(4): Alpha-Me R8-octenyl-alanine olefin amino acid connected by an all-carbon crosslinker comprising one double bond
  misc_feature (4)..(11): Crosslink between residues
  MOD_RES (10)..(10): Cyclobutyl-Ala
  MOD_RES (11)..(11): Alpha-Me S5-pentenyl-alanine olefin amino acid connected by an all-carbon crosslinker comprising one double bond
  C-term NH2
LTFAEYWAQAAS

SEQ ID NO: 1293 - protein, 17 aa, Artificial Sequence
  Description of Artificial Sequence: Synthetic peptide
  N-term 4FBzl
  MOD_RES (4)..(4): Alpha-Me R8-octenyl-alanine olefin amino acid connected by an all-carbon crosslinker comprising one double bond
  misc_feature (4)..(11): Crosslink between residues
  MOD_RES (11)..(11): Alpha-Me S5-pentenyl-alanine olefin amino acid connected by an all-carbon crosslinker comprising one double bond
  MOD_RES (17)..(17): D-amino acid
  C-term NH2
LTFAEYWAQLAAAAAAA

SEQ ID NO: 1294 - protein, 14 aa, Artificial Sequence
  Description of Artificial Sequence: Synthetic peptide
  N-term 4FBzl
  MOD_RES (4)..(4): Alpha-Me R8-octenyl-alanine olefin amino acid connected by an all-carbon crosslinker comprising one double bond
  misc_feature (4)..(11): Crosslink between residues
  MOD_RES (10)..(10): Cyclobutyl-Ala
  MOD_RES (11)..(11): Alpha-Me S5-pentenyl-alanine olefin amino acid connected by an all-carbon crosslinker comprising one double bond
  C-term NH2
LTFAEYWAQAASAA

SEQ ID NO: 1295 - protein, 17 aa, Artificial Sequence
  Description of Artificial Sequence: Synthetic peptide
  N-term Ac
  MOD_RES (4)..(4): Alpha-Me R8-octenyl-alanine olefin amino acid connected by an all-carbon crosslinker comprising one double bond
  misc_feature (4)..(11): Crosslink between residues
  MOD_RES (11)..(11): Alpha-Me S5-pentenyl-alanine olefin amino acid connected by an all-carbon crosslinker comprising one double bond
  MOD_RES (17)..(17): D-amino acid
  C-term NH2
LTFARYWAQLAAAAAAA

SEQ ID NO: 1296 - protein, 17 aa, Artificial Sequence
  Description of Artificial Sequence: Synthetic peptide
  N-term Ac
  MOD_RES (4)..(4): Alpha-Me R8-octenyl-alanine olefin amino acid connected by an all-carbon crosslinker comprising one double bond
  misc_feature (4)..(11): Crosslink between residues
  MOD_RES (11)..(11): Alpha-Me S5-pentenyl-alanine olefin amino acid connected by an all-carbon crosslinker comprising one double bond
  MOD_RES (17)..(17): D-amino acid
  C-term NH2
LTFAHYWAQLAAAAAAA

SEQ ID NO: 1297 - protein, 17 aa, Artificial Sequence
  Description of Artificial Sequence: Synthetic peptide
  N-term Ac
  MOD_RES (4)..(4): Alpha-Me R8-octenyl-alanine olefin amino acid connected by an all-carbon crosslinker comprising one double bond
  misc_feature (4)..(11): Crosslink between residues
  MOD_RES (11)..(11): Alpha-Me S5-pentenyl-alanine olefin amino acid connected by an all-carbon crosslinker comprising one double bond
  MOD_RES (17)..(17): D-amino acid
  C-term NH2
LTFAQYWAQLAAAAAAA

SEQ ID NO: 1298 - protein, 17 aa, Artificial Sequence
  Description of Artificial Sequence: Synthetic peptide
  N-term Ac
  MOD_RES (4)..(4): Alpha-Me R8-octenyl-alanine olefin amino acid connected by an all-carbon crosslinker comprising one double bond
  misc_feature (4)..(11): Crosslink between residues
  MOD_RES (5)..(5): Cit
  MOD_RES (11)..(11): Alpha-Me S5-pentenyl-alanine olefin amino acid connected by an all-carbon crosslinker comprising one double bond
  MOD_RES (17)..(17): D-amino acid
  C-term NH2
LTFAXYWAQLAAAAAAA

SEQ ID NO: 1299 - protein, 19 aa, Artificial Sequence
  Description of Artificial Sequence: Synthetic peptide
  N-term Ac
  MOD_RES (4)..(4): Alpha-Me R8-octenyl-alanine olefin amino acid connected by an all-carbon crosslinker comprising one double bond
  misc_feature (4)..(13): Crosslink between residues
  MOD_RES (6)..(7): D-amino acid
  MOD_RES (13)..(13): Alpha-Me S5-pentenyl-alanine olefin amino acid connected by an all-carbon crosslinker comprising one double bond
  MOD_RES (19)..(19): D-amino acid
  C-term NH2
LTFAELAYWAQLAAAAAAA

SEQ ID NO: 1300 - protein, 18 aa, Artificial Sequence
  Description of Artificial Sequence: Synthetic peptide
  N-term Ac
  MOD_RES (4)..(4): Alpha-Me R8-octenyl-alanine olefin amino acid connected by an all-carbon crosslinker comprising one double bond
  misc_feature (4)..(12): Crosslink between residues
  MOD_RES (5)..(5): Phe-4
  MOD_RES (6)..(6): D-amino acid
  MOD_RES (12)..(121): Alpha-Me S5-pentenyl-alanine olefin amino acid connected by an all-carbon crosslinker comprising one double bond
  MOD_RES (18)..(18): D-amino acid
  C-term NH2
LTFAFGYWAQLAAAAAAA

SEQ ID NO: 1301 - protein, 17 aa, Artificial Sequence
  Description of Artificial Sequence: Synthetic peptide
  N-term Ac
  MOD_RES (4)..(4): Alpha-Me R8-octenyl-alanine olefin amino acid connected by an all-carbon crosslinker comprising one double bond
  misc_feature (4)..(11): Crosslink between residues
  MOD_RES (5)..(5): 2m-Arg
  MOD_RES (11)..(11): Alpha-Me S5-pentenyl-alanine olefin amino acid connected by an all-carbon crosslinker comprising one double bond
  MOD_RES (17)..(17): D-amino acid
  C-term NH2
LTFARYWAQLAAAAAAA

SEQ ID NO: 1302 - protein, 17 aa, Artificial Sequence
  Description of Artificial Sequence: Synthetic peptide
  N-term Ac
  MOD_RES (4)..(4): Alpha-Me R8-octenyl-alanine olefin amino acid connected by an all-carbon crosslinker comprising one double bond
  misc_feature (4)..(11): Crosslink between residues
  MOD_RES (5)..(5): ip-Lys
  MOD_RES (11)..(11): Alpha-Me S5-pentenyl-alanine olefin amino acid connected by an all-carbon crosslinker comprising one double bond
  MOD_RES (17)..(17): D-amino acid
  C-term NH2
LTFAKYWAQLAAAAAAA

SEQ ID NO: 1303 - protein, 17 aa, Artificial Sequence
  Description of Artificial Sequence: Synthetic peptide
  N-term Ac
  MOD_RES (4)..(4): Alpha-Me R8-octenyl-alanine olefin amino acid connected by an all-carbon crosslinker comprising one double bond
  misc_feature (4)..(11): Crosslink between residues
  MOD_RES (5)..(5): Phe-4NH2
  MOD_RES (11)..(11): Alpha-Me S5-pentenyl-alanine olefin amino acid connected by an all-carbon crosslinker comprising one double bond
  MOD_RES (17)..(17): D-amino acid
  C-term NH2
LTFAFYWAQLAAAAAAA

SEQ ID NO: 1304 - protein, 17 aa, Artificial Sequence
  Description of Artificial Sequence: Synthetic peptide
  N-term Ac
  MOD_RES (4)..(4): Alpha-Me R8-octenyl-alanine olefin amino acid connected by an all-carbon crosslinker comprising one double bond
  misc_feature (4)..(11): Crosslink between residues
  MOD_RES (11)..(11): Alpha-Me S5-pentenyl-alanine olefin amino acid connected by an all-carbon crosslinker comprising one double bond
  MOD_RES (17)..(17): D-amino acid
  C-term NH2
LTFAEYWAALAAAAAAA

SEQ ID NO: 1305 - protein, 17 aa, Artificial Sequence
  Description of Artificial Sequence: Synthetic peptide
  N-term Ac
  MOD_RES (4)..(4): Alpha-Me R8-octenyl-alanine olefin amino acid connected by an all-carbon crosslinker comprising one double bond
  misc_feature (4)..(11): Crosslink between residues
  MOD_RES (11)..(11): Alpha-Me S5-pentenyl-alanine olefin amino acid connected by an all-carbon crosslinker comprising one double bond
  MOD_RES (17)..(17): D-amino acid
  C-term NH2
LTFAEYWALLAAAAAAA

SEQ ID NO: 1306 - protein, 17 aa, Artificial Sequence
  Description of Artificial Sequence: Synthetic peptide
  N-term Ac
  MOD_RES (4)..(4): Alpha-Me R8-octenyl-alanine olefin amino acid connected by an all-carbon crosslinker comprising one double bond
  misc_feature (4)..(11): Crosslink between residues
  MOD_RES (9)..(9): 2-aminoisobutyric acid
  MOD_RES (11)..(11): Alpha-Me S5-pentenyl-alanine olefin amino acid connected by an all-carbon crosslinker comprising one double bond
  MOD_RES (17)..(17): D-amino acid
  C-term NH2
LTFAEYWAXLAAAAAAA

SEQ ID NO: 1307 - protein, 17 aa, Artificial Sequence
  Description of Artificial Sequence: Synthetic peptide
  N-term Ac
  MOD_RES (4)..(4): Alpha-Me R8-octenyl-alanine olefin amino acid connected by an all-carbon crosslinker comprising one double bond
  misc_feature (4)..(11): Crosslink between residues
  MOD_RES (11)..(11): Alpha-Me S5-pentenyl-alanine olefin amino acid connected by an all-carbon crosslinker comprising one double bond
  MOD_RES (17)..(17): D-amino acid
  C-term NH2
LTFAEYWASLAAAAAAA

SEQ ID NO: 1308 - protein, 17 aa, Artificial Sequence
  Description of Artificial Sequence: Synthetic peptide
  N-term Ac
  MOD_RES (4)..(4): Alpha-Me R8-octenyl-alanine olefin amino acid connected by an all-carbon crosslinker comprising one double bond
  misc_feature (4)..(11): Crosslink between residues
  MOD_RES (11)..(11): Alpha-Me S5-pentenyl-alanine olefin amino acid connected by an all-carbon crosslinker comprising one double bond
  MOD_RES (17)..(17): D-amino acid
  C-term NH2
LTFAEYWANLAAAAAAA

SEQ ID NO: 1309 - protein, 17 aa, Artificial Sequence
  Description of Artificial Sequence: Synthetic peptide
  N-term Ac
  MOD_RES (4)..(4): Alpha-Me R8-octenyl-alanine olefin amino acid connected by an all-carbon crosslinker comprising one double bond
  misc_feature (4)..(11): Crosslink between residues
  MOD_RES (9)..(9): Cit
  MOD_RES (11)..(11): Alpha-Me S5-pentenyl-alanine olefin amino acid connected by an all-carbon crosslinker comprising one double bond
  MOD_RES (17)..(17): D-amino acid
  C-term NH2
LTFAEYWAXLAAAAAAA

SEQ ID NO: 1310 - protein, 17 aa, Artificial Sequence
  Description of Artificial Sequence: Synthetic peptide
  N-term Ac
  MOD_RES (4)..(4): Alpha-Me R8-octenyl-alanine olefin amino acid connected by an all-carbon crosslinker comprising one double bond
  misc_feature (4)..(11): Crosslink between residues
  MOD_RES (11)..(11): Alpha-Me S5-pentenyl-alanine olefin amino acid connected by an all-carbon crosslinker comprising one double bond
  MOD_RES (17)..(17): D-amino acid
  C-term NH2
LTFAEYWAHLAAAAAAA

SEQ ID NO: 1311 - protein, 17 aa, Artificial Sequence
  Description of Artificial Sequence: Synthetic peptide
  N-term Ac
  MOD_RES (4)..(4): Alpha-Me R8-octenyl-alanine olefin amino acid connected by an all-carbon crosslinker comprising one double bond
  misc_feature (4)..(11): Crosslink between residues
  MOD_RES (11)..(11): Alpha-Me S5-pentenyl-alanine olefin amino acid connected by an all-carbon crosslinker comprising one double bond
  MOD_RES (17)..(17): D-amino acid
  C-term NH2
LTFAEYWARLAAAAAAA

SEQ ID NO: 1312 - protein, 17 aa, Artificial Sequence
  Description of Artificial Sequence: Synthetic peptide
  N-term Ac
  MOD_RES (4)..(4): Alpha-Me R8-octenyl-alanine olefin amino acid connected by an all-carbon crosslinker comprising one double bond
  MOD_RES (6)..(6): pTyr
  misc_feature (4)..(11): Crosslink between residues
  MOD_RES (11)..(11): Alpha-Me S5-pentenyl-alanine olefin amino acid connected by an all-carbon crosslinker comprising one double bond
  MOD_RES (17)..(17): D-amino acid
  C-term NH2
LTFAEYWAQLAAAAAAA

SEQ ID NO: 1313 - protein, 14 aa, Artificial Sequence
  Description of Artificial Sequence: Synthetic peptide
  N-term Cbm
  MOD_RES (4)..(4): Alpha-Me R8-octenyl-alanine olefin amino acid connected by an all-carbon crosslinker comprising one double bond
  misc_feature (4)..(11): Crosslink between residues
  MOD_RES (10)..(10): Cyclobutyl-Ala
  MOD_RES (11)..(11): Alpha-Me S5-pentenyl-alanine olefin amino acid connected by an all-carbon crosslinker comprising one double bond
  C-term NH2
LTFAEYWAQAASAA

SEQ ID NO: 1314 - protein, 17 aa, Artificial Sequence
  Description of Artificial Sequence: Synthetic peptide
  N-term Cbm
  MOD_RES (4)..(4): Alpha-Me R8-octenyl-alanine olefin amino acid connected by an all-carbon crosslinker comprising one double bond
  misc_feature (4)..(11): Crosslink between residues
  MOD_RES (11)..(11): Alpha-Me S5-pentenyl-alanine olefin amino acid connected by an all-carbon crosslinker comprising one double bond
  MOD_RES (17)..(17): D-amino acid
  C-term NH2
LTFAEYWAQLAAAAAAA

SEQ ID NO: 1315 - protein, 17 aa, Artificial Sequence
  Description of Artificial Sequence: Synthetic peptide
  N-term Ac
  MOD_RES (4)..(4): Alpha-Me R8-octenyl-alanine olefin amino acid connected by an all-carbon crosslinker comprising one double bond
  misc_feature (4)..(11): Crosslink between residues
  MOD_RES (11)..(11): Alpha-Me S5-pentenyl-alanine olefin amino acid connected by an all-carbon crosslinker comprising one double bond
  MOD_RES (17)..(17): D-amino acid
  C-term NH2
LTFAEYWAQLASAAAAA

SEQ ID NO: 1316 - protein, 17 aa, Artificial Sequence
  Description of Artificial Sequence: Synthetic peptide
  N-term Ac
  MOD_RES (4)..(4): Alpha-Me R8-octenyl-alanine olefin amino acid connected by an all-carbon crosslinker comprising one double bond
  misc_feature (4)..(11): Crosslink between residues
  MOD_RES (11)..(11): Alpha-Me S5-pentenyl-alanine olefin amino acid connected by an all-carbon crosslinker comprising one double bond
  MOD_RES (17)..(17): D-amino acid
  C-term NH2
LTFAEYWAQLAAAAASA

SEQ ID NO: 1317 - protein, 17 aa, Artificial Sequence
  Description of Artificial Sequence: Synthetic peptide
  N-term Ac
  MOD_RES (4)..(4): Alpha-Me R8-octenyl-alanine olefin amino acid connected by an all-carbon crosslinker comprising one double bond
  misc_feature (4)..(11): Crosslink between residues
  MOD_RES (11)..(11): Alpha-Me S5-pentenyl-alanine olefin amino acid connected by an all-carbon crosslinker comprising one double bond
  MOD_RES (17)..(17): D-amino acid
  C-term NH2
LTFAEYWAQLASAAASA

SEQ ID NO: 1318 - protein, 18 aa, Artificial Sequence
  Description of Artificial Sequence: Synthetic peptide
  N-term Ac
  MOD_RES (4)..(4): Alpha-Me R8-octenyl-alanine olefin amino acid connected by an all-carbon crosslinker comprising one double bond
  misc_feature (4)..(12): Crosslink between residues
  MOD_RES (11)..(11): Beta-Ala
  MOD_RES (12)..(12): Alpha-Me S5-pentenyl-alanine olefin amino acid connected by an all-carbon crosslinker comprising one double bond
  MOD_RES (18)..(18): D-amino acid
  C-term NH2
LTFAEYWAQTAAAAAAAA

SEQ ID NO: 1319 - protein, 17 aa, Artificial Sequence
  Description of Artificial Sequence: Synthetic peptide
  N-term Ac
  MOD_RES (4)..(4): Alpha-Me R8-octenyl-alanine olefin amino acid connected by an all-carbon crosslinker comprising one double bond
  misc_feature (4)..(11): Crosslink between residues
  MOD_RES (10)..(10): Adamantyl-Gly
  MOD_RES (11)..(11): Alpha-Me S5-pentenyl-alanine olefin amino acid connected by an all-carbon crosslinker comprising one double bond
  MOD_RES (17)..(17): D-amino acid
  C-term NH2
LTFAEYWAQGAAAAAAA

SEQ ID NO: 1320 - protein, 17 aa, Artificial Sequence
  Description of Artificial Sequence: Synthetic peptide
  N-term Ac
  MOD_RES (4)..(4): Alpha-Me R8-octenyl-alanine olefin amino acid connected by an all-carbon crosslinker comprising one double bond
  misc_feature (4)..(11): Crosslink between residues
  MOD_RES (10)..(10): Cyclohexyl-Ala
  MOD_RES (11)..(11): Alpha-Me S5-pentenyl-alanine olefin amino acid connected by an all-carbon crosslinker comprising one double bond
  MOD_RES (17)..(17): D-amino acid
  C-term NH2
LTFAEYWAQAAAAAAAA

SEQ ID NO: 1321 - protein, 17 aa, Artificial Sequence
  Description of Artificial Sequence: Synthetic peptide
  N-term Ac
  MOD_RES (4)..(4): Alpha-Me R8-octenyl-alanine olefin amino acid connected by an all-carbon crosslinker comprising one double bond
  misc_feature (4)..(11): Crosslink between residues
  MOD_RES (10)..(10): homo-cyclohexyl-Ala
  MOD_RES (11)..(11): Alpha-Me S5-pentenyl-alanine olefin amino acid connected by an all-carbon crosslinker comprising one double bond
  MOD_RES (17)..(17): D-amino acid
  C-term NH2
LTFAEYWAQAAAAAAAA

SEQ ID NO: 1322 - protein, 17 aa, Artificial Sequence
  Description of Artificial Sequence: Synthetic peptide
  N-term Ac
  MOD_RES (4)..(4): Alpha-Me R8-octenyl-alanine olefin amino acid connected by an all-carbon crosslinker comprising one double bond
  misc_feature (4)..(11): Crosslink between residues
  MOD_RES (11)..(11): Alpha-Me S5-pentenyl-alanine olefin amino acid connected by an all-carbon crosslinker comprising one double bond
  MOD_RES (17)..(17): D-amino acid
  C-term NH2
LTFAEYWAQFAAAAAAA

SEQ ID NO: 1323 - protein, 17 aa, Artificial Sequence
  Description of Artificial Sequence: Synthetic peptide
  N-term Ac
  MOD_RES (4)..(4): Alpha-Me R8-octenyl-alanine olefin amino acid connected by an all-carbon crosslinker comprising one double bond
  misc_feature (4)..(11): Crosslink between residues
  MOD_RES (10)..(10): homo-Phe
  MOD_RES (11)..(11): Alpha-Me S5-pentenyl-alanine olefin amino acid connected by an all-carbon crosslinker comprising one double bond
  MOD_RES (17)..(17): D-amino acid
  C-term NH2
LTFAEYWAQFAAAAAAA

SEQ ID NO: 1324 - protein, 17 aa, Artificial Sequence
  Description of Artificial Sequence: Synthetic peptide
  N-term Ac
  MOD_RES (4)..(4): Alpha-Me R8-octenyl-alanine olefin amino acid connected by an all-carbon crosslinker comprising one double bond
  misc_feature (4)..(11): Crosslink between residues
  MOD_RES (11)..(11): Alpha-Me S5-pentenyl-alanine olefin amino acid connected by an all-carbon crosslinker comprising one double bond
  MOD_RES (14)..(14): Norleucine
  MOD_RES (17)..(17): D-amino acid
  C-term NH2
LTFAEYWAQLAAALAAA

SEQ ID NO: 1325 - protein, 17 aa, Artificial Sequence
  Description of Artificial Sequence: Synthetic peptide
  N-term Ac
  MOD_RES (4)..(4): Alpha-Me R8-octenyl-alanine olefin amino acid connected by an all-carbon crosslinker comprising one double bond
  misc_feature (4)..(11): Crosslink between residues
  MOD_RES (10)..(10): Adamantyl-Gly
  MOD_RES (11)..(11): Alpha-Me S5-pentenyl-alanine olefin amino acid connected by an all-carbon crosslinker comprising one double bond
  MOD_RES (14)..(14): Norleucine
  MOD_RES (17)..(17): D-amino acid
  C-term NH2
LTFAEYWAQGAAALAAA

SEQ ID NO: 1326 - protein, 18 aa, Artificial Sequence
  Description of Artificial Sequence: Synthetic peptide
  N-term 4FBz
  MOD_RES (1)..(1): Beta-Ala
  MOD_RES (5)..(5): Alpha-Me R8-octenyl-alanine olefin amino acid connected by an all-carbon crosslinker comprising one double bond
  misc_feature (5)..(12): Crosslink between residues
  MOD_RES (12)..(12): Alpha-Me S5-pentenyl-alanine olefin amino acid connected by an all-carbon crosslinker comprising one double bond
  MOD_RES (18)..(18): D-amino acid
  C-term NH2
ALTFAEYWAQLAAAAAAA

SEQ ID NO: 1327 - protein, 15 aa, Artificial Sequence
  Description of Artificial Sequence: Synthetic peptide
  N-term 4FBz
  MOD_RES (1)..(1): Beta-Ala
  MOD_RES (5)..(5): Alpha-Me R8-octenyl-alanine olefin amino acid connected by an all-carbon crosslinker comprising one double bond
  misc_feature (5)..(12): Crosslink between residues
  MOD_RES (11)..(11): Cyclobutyl-Ala
  MOD_RES (12)..(12): Alpha-Me S5-pentenyl-alanine olefin amino acid connected by an all-carbon crosslinker comprising one double bond
  C-term NH2
ALTFAEYWAQAASAA

SEQ ID NO: 1328 - protein, 17 aa, Artificial Sequence
  Description of Artificial Sequence: Synthetic peptide
  N-term Ac
  MOD_RES (4)..(4): Alpha-Me R5-pentenyl-alanine olefin amino acid connected by an all-carbon crosslinker comprising one double bond
  misc_feature (4)..(11): Crosslink between residues
  MOD_RES (11)..(11): Alpha-Me S8-octenyl-alanine olefin amino acid connected by an all-carbon crosslinker comprising one double bond
  MOD_RES (17)..(17): D-amino acid
  C-term NH2
LTFAEYWAQLAAAAAAA

SEQ ID NO: 1329 - protein, 14 aa, Artificial Sequence
  Description of Artificial Sequence: Synthetic peptide
  N-term Ac
  MOD_RES (4)..(4): Alpha-Me R5-pentenyl-alanine olefin amino acid connected by an all-carbon crosslinker comprising one double bond
  misc_feature (4)..(11): Crosslink between residues
  MOD_RES (10)..(10): Cyclobutyl-Ala
  MOD_RES (11)..(11): Alpha-Me S8-octenyl-alanine olefin amino acid connected by an all-carbon crosslinker comprising one double bond
  C-term NH2
LTFAEYWAQAASAA

SEQ ID NO: 1330 - protein, 17 aa, Artificial Sequence
  Description of Artificial Sequence: Synthetic peptide
  N-term Ac
  MOD_RES (4)..(4): Alpha-Me R8-octenyl-alanine olefin amino acid connected by an all-carbon crosslinker comprising one double bond
  misc_feature (4)..(11): Crosslink between residues
  MOD_RES (11)..(11): Alpha-Me S5-pentenyl-alanine olefin amino acid connected by an all-carbon crosslinker comprising one double bond
  MOD_RES (14)..(14): hhLeu
  MOD_RES (17)..(17): D-amino acid
  C-term NH2
LTFAEYWAQLAAALAAA

SEQ ID NO: 1331 - protein, 19 aa, Artificial Sequence
  Description of Artificial Sequence: Synthetic peptide
  N-term Ac
  MOD_RES (4)..(4): Alpha-Me R8-octenyl-alanine olefin amino acid connected by an all-carbon crosslinker comprising one double bond
  misc_feature (4)..(11): Crosslink between residues
  MOD_RES (11)..(11): Alpha-Me S5-pentenyl-alanine olefin amino acid connected by an all-carbon crosslinker comprising one double bond
  MOD_RES (19)..(19): D-amino acid
  C-term NH2
LTFAEYWAQLAAAAAAAAA

SEQ ID NO: 1332 - protein, 20 aa, Artificial Sequence
  Description of Artificial Sequence: Synthetic peptide
  N-term Ac
  MOD_RES (4)..(4): Alpha-Me R8-octenyl-alanine olefin amino acid connected by an all-carbon crosslinker comprising one double bond
  misc_feature (4)..(11): Crosslink between residues
  MOD_RES (11)..(11): Alpha-Me S5-pentenyl-alanine olefin amino acid connected by an all-carbon crosslinker comprising one double bond
  MOD_RES (20)..(20): D-amino acid
  C-term NH2
LTFAEYWAQLAAAAAAAAAA

SEQ ID NO: 1333 - protein, 21 aa, Artificial Sequence
  Description of Artificial Sequence: Synthetic peptide
  N-term Ac
  MOD_RES (4)..(4): Alpha-Me R8-octenyl-alanine olefin amino acid connected by an all-carbon crosslinker comprising one double bond
  misc_feature (4)..(11): Crosslink between residues
  MOD_RES (11)..(11): Alpha-Me S5-pentenyl-alanine olefin amino acid connected by an all-carbon crosslinker comprising one double bond
  MOD_RES (21)..(21): D-amino acid
  C-term NH2
LTFAEYWAQLAAAAAAAAAAA

SEQ ID NO: 1334 - protein, 14 aa, Artificial Sequence
  Description of Artificial Sequence: Synthetic peptide
  N-term Ac
  MOD_RES (4)..(4): Alpha-Me R8-octenyl-alanine olefin amino acid connected by an all-carbon crosslinker comprising one double bond
  misc_feature (4)..(11): Crosslink between residues
  MOD_RES (10)..(10): Cyclobutyl-Ala
  MOD_RES (11)..(11): Alpha-Me S5-pentenyl-alanine olefin amino acid connected by an all-carbon crosslinker comprising one double bond
  C-term NH2
LTAAEYAAQAASAA

SEQ ID NO: 1335 - protein, 17 aa, Artificial Sequence
  Description of Artificial Sequence: Synthetic peptide
  N-term Ac
  MOD_RES (4)..(4): Alpha-Me R8-octenyl-alanine olefin amino acid connected by an all-carbon crosslinker comprising one double bond
  misc_feature (4)..(11): Crosslink between residues
  MOD_RES (11)..(11): Alpha-Me S5-pentenyl-alanine olefin amino acid connected by an all-carbon crosslinker comprising one double bond
  MOD_RES (17)..(17): D-amino acid
  C-term NH2
LTAAEYAAQLAAAAAAA

SEQ ID NO: 1336 - protein, 17 aa, Artificial Sequence
  Description of Artificial Sequence: Synthetic peptide
  N-term Ac
  MOD_RES (4)..(4): Alpha-Me R8-octenyl-alanine olefin amino acid connected by an all-carbon crosslinker comprising one double bond
  misc_feature (4)..(11): Crosslink between residues
  MOD_RES (6)..(6): Pmp
  MOD_RES (11)..(11): Alpha-Me S5-pentenyl-alanine olefin amino acid connected by an all-carbon crosslinker comprising one double bond
  MOD_RES (17)..(17): D-amino acid
  C-term NH2
LTFAEXWAQLAAAAAAA

SEQ ID NO: 1337 - protein, 14 aa, Artificial Sequence
  Description of Artificial Sequence: Synthetic peptide
  N-term Ac
  MOD_RES (4)..(4): Alpha-Me R8-octenyl-alanine olefin amino acid connected by an all-carbon crosslinker comprising one double bond
  misc_feature (4)..(11): Crosslink between residues
  MOD_RES (6)..(6): Pmp
  MOD_RES (10)..(10): Cyclobutyl-Ala
  MOD_RES (11)..(11): Alpha-Me S5-pentenyl-alanine olefin amino acid connected by an all-carbon crosslinker comprising one double bond
  C-term NH2
LTFAEXWAQAASAA

SEQ ID NO: 1338 - protein, 12 aa, Artificial Sequence
  Description of Artificial Sequence: Synthetic peptide
  N-term Ac
  MOD_RES (4)..(4): Alpha-Me R8-octenyl-alanine olefin amino acid connected by an all-carbon crosslinker comprising one double bond
  misc_feature (4)..(11): Crosslink between residues
  MOD_RES (11)..(11): Alpha-Me S5-pentenyl-alanine olefin amino acid connected by an all-carbon crosslinker comprising one double bond
  C-term NH2
ATFAHYWAQLAS

SEQ ID NO: 1339 - protein, 12 aa, Artificial Sequence
  Description of Artificial Sequence: Synthetic peptide
  N-term Ac
  MOD_RES (4)..(4): Alpha-Me R8-octenyl-alanine olefin amino acid connected by an all-carbon crosslinker comprising one double bond
  misc_feature (4)..(11): Crosslink between residues
  MOD_RES (11)..(11): Alpha-Me S5-pentenyl-alanine olefin amino acid connected by an all-carbon crosslinker comprising one double bond
  C-term NH2
LTFAHAWAQLAS

SEQ ID NO: 1340 - protein, 12 aa, Artificial Sequence
  Description of Artificial Sequence: Synthetic peptide
  N-term Ac
  MOD_RES (4)..(4): Alpha-Me R8-octenyl-alanine olefin amino acid connected by an all-carbon crosslinker comprising one double bond
  misc_feature (4)..(11): Crosslink between residues
  MOD_RES (11)..(11): Alpha-Me S5-pentenyl-alanine olefin amino acid connected by an all-carbon crosslinker comprising one double bond
  C-term NH2
LTFAHYWAQAAS

SEQ ID NO: 1341 - protein, 13 aa, Artificial Sequence
  Description of Artificial Sequence: Synthetic peptide
  N-term Ac
  MOD_RES (4)..(4): Alpha-Me R8-octenyl-alanine olefin amino acid connected by an all-carbon crosslinker comprising one double bond
  misc_feature (4)..(11): Crosslink between residues
  MOD_RES (10)..(10): Cyclobutyl-Ala
  MOD_RES (11)..(11): Alpha-Me S5-pentenyl-alanine olefin amino acid connected by an all-carbon crosslinker comprising one double bond
  C-term NH2
LTFAEYWAQAASA

SEQ ID NO: 1342 - protein, 14 aa, Artificial Sequence
  Description of Artificial Sequence: Synthetic peptide
  N-term Ac
  MOD_RES (4)..(4): Alpha-Me R8-octenyl-alanine olefin amino acid connected by an all-carbon crosslinker comprising one double bond
  misc_feature (4)..(11): Crosslink between residues
  MOD_RES (11)..(11): Alpha-Me S5-pentenyl-alanine olefin amino acid connected by an all-carbon crosslinker comprising one double bond
  C-term NH2
LTFAEYWAQLASAA

SEQ ID NO: 1343 - protein, 14 aa, Artificial Sequence
  Description of Artificial Sequence: Synthetic peptide
  N-term Ac
  MOD_RES (4)..(4): Alpha-Me R8-octenyl-alanine olefin amino acid connected by an all-carbon crosslinker comprising one double bond
  misc_feature (4)..(11): Crosslink between residues
  MOD_RES (10)..(10): Cyclobutyl-Ala
  MOD_RES (11)..(11): Alpha-Me S5-pentenyl-alanine olefin amino acid connected by an all-carbon crosslinker comprising one double bond
  C-term NH2
LTFAHYWAQAASAA

SEQ ID NO: 1344 - protein, 14 aa, Artificial Sequence
  Description of Artificial Sequence: Synthetic peptide
  N-term Ac
  MOD_RES (4)..(4): Alpha-Me R8-octenyl-alanine olefin amino acid connected by an all-carbon crosslinker comprising one double bond
  misc_feature (4)..(11): Crosslink between residues
  MOD_RES (10)..(10): Cyclobutyl-Ala
  MOD_RES (11)..(11): Alpha-Me S5-pentenyl-alanine olefin amino acid connected by an all-carbon crosslinker comprising one double bond
  C-term NH2
LTFASYWAQAASAA

SEQ ID NO: 1345 - protein, 14 aa, Artificial Sequence
  Description of Artificial Sequence: Synthetic peptide
  N-term Ac
  MOD_RES (4)..(4): Alpha-Me R8-octenyl-alanine olefin amino acid connected by an all-carbon crosslinker comprising one double bond
  misc_feature (4)..(11): Crosslink between residues
  MOD_RES (10)..(10): Cyclobutyl-Ala
  MOD_RES (11)..(11): Alpha-Me S5-pentenyl-alanine olefin amino acid connected by an all-carbon crosslinker comprising one double bond
  C-term NH2
LTFARYWAQAASAA

SEQ ID NO: 1346 - protein, 14 aa, Artificial Sequence
  Description of Artificial Sequence: Synthetic peptide
  N-term Ac
  MOD_RES (4)..(4): Alpha-Me R8-octenyl-alanine olefin amino acid connected by an all-carbon crosslinker comprising one double bond
  misc_feature (4)..(11): Crosslink between residues
  MOD_RES (10)..(10): Cyclobutyl-Ala
  MOD_RES (11)..(11): Alpha-Me S5-pentenyl-alanine olefin amino acid connected by an all-carbon crosslinker comprising one double bond
  C-term NH2
LTFAKYWAQAASAA

SEQ ID NO: 1347 - protein, 14 aa, Artificial Sequence
  Description of Artificial Sequence: Synthetic peptide
  N-term Ac
  MOD_RES (4)..(4): Alpha-Me R8-octenyl-alanine olefin amino acid connected by an all-carbon crosslinker comprising one double bond
  misc_feature (4)..(11): Crosslink between residues
  MOD_RES (10)..(10): Cyclobutyl-Ala
  MOD_RES (11)..(11): Alpha-Me S5-pentenyl-alanine olefin amino acid connected by an all-carbon crosslinker comprising one double bond
  C-term NH2
LTFAQYWAQAASAA

SEQ ID NO: 1348 - protein, 14 aa, Artificial Sequence
  Description of Artificial Sequence: Synthetic peptide
  N-term Ac
  MOD_RES (4)..(4): Alpha-Me R8-octenyl-alanine olefin amino acid connected by an all-carbon crosslinker comprising one double bond
  misc_feature (4)..(11): Crosslink between residues
  MOD_RES (10)..(10): Cyclobutyl-Ala
  MOD_RES (11)..(11): Alpha-Me S5-pentenyl-alanine olefin amino acid connected by an all-carbon crosslinker comprising one double bond
  C-term NH2
LTFAEYWAAAASAA

SEQ ID NO: 1349 - protein, 14 aa, Artificial Sequence
  Description of Artificial Sequence: Synthetic peptide
  N-term Ac
  MOD_RES (4)..(4): Alpha-Me R8-octenyl-alanine olefin amino acid connected by an all-carbon crosslinker comprising one double bond
  misc_feature (4)..(11): Crosslink between residues
  MOD_RES (10)..(10): Cyclobutyl-Ala
  MOD_RES (11)..(11): Alpha-Me S5-pentenyl-alanine olefin amino acid connected by an all-carbon crosslinker comprising one double bond
  C-term NH2
LTFAEYWAQAAAAA

SEQ ID NO: 1350 - protein, 16 aa, Artificial Sequence
  Description of Artificial Sequence: Synthetic peptide
  N-term Ac
  MOD_RES (4)..(4): Alpha-Me R8-octenyl-alanine olefin amino acid connected by an all-carbon crosslinker comprising one double bond
  misc_feature (4)..(11): Crosslink between residues
  MOD_RES (11)..(11): Alpha-Me S5-pentenyl-alanine olefin amino acid connected by an all-carbon crosslinker comprising one double bond
  C-term OH
LTFAEYWAQLAAAAAA

SEQ ID NO: 1351 - protein, 15 aa, Artificial Sequence
  Description of Artificial Sequence: Synthetic peptide
  N-term Ac
  MOD_RES (4)..(4): Alpha-Me R8-octenyl-alanine olefin amino acid connected by an all-carbon crosslinker comprising one double bond
  misc_feature (4)..(11): Crosslink between residues
  MOD_RES (11)..(11): Alpha-Me S5-pentenyl-alanine olefin amino acid connected by an all-carbon crosslinker comprising one double bond
  C-term OH
LTFAEYWAQLAAAAA

SEQ ID NO: 1352 - protein, 13 aa, Artificial Sequence
  Description of Artificial Sequence: Synthetic peptide
  N-term Ac
  MOD_RES (4)..(4): Alpha-Me R8-octenyl-alanine olefin amino acid connected by an all-carbon crosslinker comprising one double bond
  misc_feature (4)..(11): Crosslink between residues
  MOD_RES (11)..(11): Alpha-Me S5-pentenyl-alanine olefin amino acid connected by an all-carbon crosslinker comprising one double bond
  C-term OH
LTFAEYWAQLAAA

SEQ ID NO: 1353 - protein, 17 aa, Artificial Sequence
  Description of Artificial Sequence: Synthetic peptide
  N-term Ac
  MOD_RES (4)..(4): Alpha-Me R8-octenyl-alanine olefin amino acid connected by an all-carbon crosslinker comprising one double bond
  misc_feature (4)..(11): Crosslink between residues
  MOD_RES (6)..(6): Phe-4bOH2
  MOD_RES (11)..(11): Alpha-Me S5-pentenyl-alanine olefin amino acid connected by an all-carbon crosslinker comprising one double bond
  MOD_RES (17)..(17): D-amino acid
  C-term NH2
LTFAAFWAQLAAAAAAA

SEQ ID NO: 1354 - protein, 17 aa, Artificial Sequence
  Description of Artificial Sequence: Synthetic peptide
  N-term Ac
  MOD_RES (4)..(4): Alpha-Me R8-octenyl-alanine olefin amino acid connected by an all-carbon crosslinker comprising one double bond
  misc_feature (4)..(11): Crosslink between residues
  MOD_RES (6)..(6): Phe-4bOH2
  MOD_RES (11)..(11): Alpha-Me S5-pentenyl-alanine olefin amino acid connected by an all-carbon crosslinker comprising one double bond
  MOD_RES (17)..(17): D-amino acid
  C-term NH2
LTFAAFWAALAAAAAAA

SEQ ID NO: 1355 - protein, 14 aa, Artificial Sequence
  Description of Artificial Sequence: Synthetic peptide
  N-term Ac
  MOD_RES (4)..(4): Alpha-Me R8-octenyl-alanine olefin amino acid connected by an all-carbon crosslinker comprising one double bond
  misc_feature (4)..(11): Crosslink between residues
  MOD_RES (6)..(6): Phe-4bOH2
  MOD_RES (10)..(10): Cyclobutyl-Ala
  MOD_RES (11)..(11): Alpha-Me S5-pentenyl-alanine olefin amino acid connected by an all-carbon crosslinker comprising one double bond
  C-term NH2
LTFAEFWAQAASAA

SEQ ID NO: 1356 - protein, 17 aa, Artificial Sequence
  Description of Artificial Sequence: Synthetic peptide
  N-term Ac
  MOD_RES (4)..(4): Alpha-Me R8-octenyl-alanine olefin amino acid connected by an all-carbon crosslinker comprising one double bond
  misc_feature (4)..(11): Crosslink between residues
  MOD_RES (6)..(6): pY
  MOD_RES (11)..(11): Alpha-Me S5-pentenyl-alanine olefin amino acid connected by an all-carbon crosslinker comprising one double bond
  MOD_RES (17)..(17): D-amino acid
  C-term NH2
LTFAAYWAQLAAAAAAA

SEQ ID NO: 1357 - protein, 17 aa, Artificial Sequence
  Description of Artificial Sequence: Synthetic peptide
  N-term Ac
  MOD_RES (4)..(4): Alpha-Me R8-octenyl-alanine olefin amino acid connected by an all-carbon crosslinker comprising one double bond
  misc_feature (4)..(11): Crosslink between residues
  MOD_RES (6)..(6): pY
  MOD_RES (11)..(11): Alpha-Me S5-pentenyl-alanine olefin amino acid connected by an all-carbon crosslinker comprising one double bond
  MOD_RES (17)..(17): D-amino acid
  C-term NH2
LTFAAYWAALAAAAAAA

SEQ ID NO: 1358 - protein, 14 aa, Artificial Sequence
  Description of Artificial Sequence: Synthetic peptide
  N-term Ac
  MOD_RES (4)..(4): Alpha-Me R8-octenyl-alanine olefin amino acid connected by an all-carbon crosslinker comprising one double bond
  misc_feature (4)..(11): Crosslink between residues
  MOD_RES (6)..(6): pY
  MOD_RES (10)..(10): Cyclobutyl-Ala
  MOD_RES (11)..(11): Alpha-Me S5-pentenyl-alanine olefin amino acid connected by an all-carbon crosslinker comprising one double bond
  C-term NH2
LTFAEYWAQAASAA

SEQ ID NO: 1359 - protein, 17 aa, Artificial Sequence
  Description of Artificial Sequence: Synthetic peptide
  N-term Ac
  MOD_RES (4)..(4): Alpha-Me R6-hexynyl-alanine alkynyl amino acids, crosslinke via a dialkyne bond with a second alkynyl amino acid
  misc_feature (4)..(11): Crosslink between residues
  MOD_RES (11)..(11): Alpha-Me S5-pentynyl-alanine alkynyl amino acids, wherein the alkyne forms one half of a dialkyne bond with a second alkynyl amino acid
  MOD_RES (17)..(17): D-amino acid
  C-term NH2
LTFAAYWAQLAAAAAAA

SEQ ID NO: 1360 - protein, 14 aa, Artificial Sequence
  Description of Artificial Sequence: Synthetic peptide
  N-term Ac
  MOD_RES (4)..(4): Alpha-Me R6-hexynyl-alanine alkynyl amino acids, crosslinke via a dialkyne bond with a second alkynyl amino acid
  misc_feature (4)..(11): Crosslink between residues
  MOD_RES (10)..(10): Cyclobutyl-Ala
  MOD_RES (11)..(11): Alpha-Me S5-pentynyl-alanine alkynyl amino acids, wherein the alkyne forms one half of a dialkyne bond with a second alkynyl amino acid
  C-term NH2
LTFAEYWAQAASAA

SEQ ID NO: 1361 - protein, 17 aa, Artificial Sequence
  Description of Artificial Sequence: Synthetic peptide
  N-term Ac
  MOD_RES (4)..(4): Alpha-Me R6-hexynyl-alanine alkynyl amino acids, crosslinke via a dialkyne bond with a second alkynyl amino acid
  misc_feature (4)..(11): Crosslink between residues
  MOD_RES (11)..(11): Alpha-Me S5-pentynyl-alanine alkynyl amino acids, wherein the alkyne forms one half of a dialkyne bond with a second alkynyl amino acid
  MOD_RES (17)..(17): D-amino acid
  C-term NH2
LTFAEYWAQLAAAAAAA

SEQ ID NO: 1362 - protein, 17 aa, Artificial Sequence
  Description of Artificial Sequence: Synthetic peptide
  N-term Ac
  MOD_RES (4)..(4): Alpha-Me R9-nonynyl-alanine alkynyl amino acid crosslinked via an alkyne metathesis reaction with a second alkynyl amino acid
  misc_feature (4)..(11): Crosslink between residues
  MOD_RES (11)..(11): Alpha-Me S6-hexynyl-alanine alkynyl amino acid crosslinked via an alkyne metathesis reaction with a second alkynyl amino acid
  MOD_RES (17)..(17): D-amino acid
  C-term NH2
LTFAEYWAQLAAAAAAA

SEQ ID NO: 1363 - protein, 17 aa, Artificial Sequence
  Description of Artificial Sequence: Synthetic peptide
  N-term Ac
  MOD_RES (4)..(4): Alpha-Me R9-nonynyl-alanine alkynyl amino acid crosslinked via an alkyne metathesis reaction with a second alkynyl amino acid
  misc_feature (4)..(11): Crosslink between residues
  MOD_RES (11)..(11): Alpha-Me S6-hexynyl-alanine alkynyl amino acid crosslinked via an alkyne metathesis reaction with a second alkynyl amino acid
  MOD_RES (17)..(17): D-amino acid
  C-term NH2
LTFAEYWAQLAAAAAAA

SEQ ID NO: 1364 - protein, 14 aa, Artificial Sequence
  Description of Artificial Sequence: Synthetic peptide
  N-term Ac
  MOD_RES (4)..(4): Alpha-Me R9-nonynyl-alanine alkynyl amino acid crosslinked via an alkyne metathesis reaction with a second alkynyl amino acid
  misc_feature (4)..(11): Crosslink between residues
  MOD_RES (10)..(10): Cyclobutyl-Ala
  MOD_RES (11)..(11): Alpha-Me S6-hexynyl-alanine alkynyl amino acid crosslinked via an alkyne metathesis reaction with a second alkynyl amino acid
  C-term NH2
LTFAEYWAQAASAA

SEQ ID NO: 1365 - protein, 14 aa, Artificial Sequence
  Description of Artificial Sequence: Synthetic peptide
  N-term Ac
  MOD_RES (4)..(4): Alpha-Me R9-nonynyl-alanine alkynyl amino acid crosslinked via an alkyne metathesis reaction with a second alkynyl amino acid
  misc_feature (4)..(11): Crosslink between residues
  MOD_RES (10)..(10): Cyclobutyl-Ala
  MOD_RES (11)..(11): Alpha-Me S6-hexynyl-alanine alkynyl amino acid crosslinked via an alkyne metathesis reaction with a second alkynyl amino acid
  C-term NH2
LTAAEYWAQAASAA

SEQ ID NO: 1366 - protein, 15 aa, Artificial Sequence
  Description of Artificial Sequence: Synthetic peptide
  N-term 5-FAM
  MOD_RES (1)..(1): Beta-Ala
  MOD_RES (5)..(5): Alpha-Me R9-nonynyl-alanine alkynyl amino acid crosslinked via an alkyne metathesis reaction with a second alkynyl amino acid
  misc_feature (5)..(12): Crosslink between residues
  MOD_RES (11)..(11): Cyclobutyl-Ala
  MOD_RES (12)..(12): Alpha-Me S6-hexynyl-alanine alkynyl amino acid crosslinked via an alkyne metathesis reaction with a second alkynyl amino acid
  C-term NH2
ALTFAEYWAQAASAA

SEQ ID NO: 1367 - protein, 18 aa, Artificial Sequence
  Description of Artificial Sequence: Synthetic peptide
  N-term 5-FAM
  MOD_RES (1)..(1): Beta-Ala
  MOD_RES (5)..(5): Alpha-Me R8-octenyl-alanine olefin amino acid connected by an all-carbon crosslinker comprising one double bond
  misc_feature (5)..(12): Crosslink between residues
  MOD_RES (12)..(12): Alpha-Me S5-pentenyl-alanine olefin amino acid connected by an all-carbon crosslinker comprising one double bond
  MOD_RES (18)..(18): D-amino acid
  C-term NH2
ALTFAEYWAQLAAAAAAA

SEQ ID NO: 1368 - protein, 18 aa, Artificial Sequence
  Description of Artificial Sequence: Synthetic peptide
  N-term 5-FAM
  MOD_RES (1)..(1): Beta-Ala
  MOD_RES (5)..(5): Alpha-Me R8-octenyl-alanine olefin amino acid that is not connected by a crosslinker
  MOD_RES (12)..(12): Alpha-Me S5-pentenyl-alanine olefin amino acid that is not connected by a crosslinker
  MOD_RES (18)..(18): D-amino acid
  C-term NH2
ALTFAEYWAQLAAAAAAA

SEQ ID NO: 1369 - protein, 18 aa, Artificial Sequence
  Description of Artificial Sequence: Synthetic peptide
  N-term 5-FAM
  MOD_RES (1)..(1): Beta-Ala
  MOD_RES (5)..(5): Alpha-Me R8-octenyl-alanine olefin amino acid connected by an all-carbon crosslinker comprising one double bond
  misc_feature (5)..(12): Crosslink between residues
  MOD_RES (12)..(12): Alpha-Me S5-pentenyl-alanine olefin amino acid connected by an all-carbon crosslinker comprising one double bond
  MOD_RES (18)..(18): D-amino acid
  C-term NH2
ALTAAEYWAQLAAAAAAA

SEQ ID NO: 1370 - protein, 18 aa, Artificial Sequence
  Description of Artificial Sequence: Synthetic peptide
  N-term 5-FAM
  MOD_RES (1)..(1): Beta-Ala
  MOD_RES (5)..(5): Alpha-Me R8-octenyl-alanine olefin amino acid connected by an all-carbon crosslinker comprising one double bond
  misc_feature (5)..(12): Crosslink between residues
  MOD_RES (12)..(12): Alpha-Me S5-pentenyl-alanine olefin amino acid connected by an all-carbon crosslinker comprising one double bond
  MOD_RES (18)..(18): D-amino acid
  C-term NH2
ALTFAAYWAQLAAAAAAA

SEQ ID NO: 1371 - protein, 18 aa, Artificial Sequence
  Description of Artificial Sequence: Synthetic peptide
  N-term 5-FAM
  MOD_RES (1)..(1): Beta-Ala
  MOD_RES (5)..(5): Alpha-Me R8-octenyl-alanine olefin amino acid connected by an all-carbon crosslinker comprising one double bond
  misc_feature (5)..(12): Crosslink between residues
  MOD_RES (12)..(12): Alpha-Me S5-pentenyl-alanine olefin amino acid connected by an all-carbon crosslinker comprising one double bond
  MOD_RES (18)..(18): D-amino acid
  C-term NH2
AATFAEYWAQLAAAAAAA

SEQ ID NO: 1372 - protein, 18 aa, Artificial Sequence
  Description of Artificial Sequence: Synthetic peptide
  N-term 5-FAM
  MOD_RES (1)..(1): Beta-Ala
  MOD_RES (5)..(5): Alpha-Me R8-octenyl-alanine olefin amino acid connected by an all-carbon crosslinker comprising one double bond
  misc_feature (5)..(12): Crosslink between residues
  MOD_RES (12)..(12): Alpha-Me S5-pentenyl-alanine olefin amino acid connected by an all-carbon crosslinker comprising one double bond
  MOD_RES (18)..(18): D-amino acid
  C-term NH2
ALAFAEYWAQLAAAAAAA

SEQ ID NO: 1373 - protein, 18 aa, Artificial Sequence
  Description of Artificial Sequence: Synthetic peptide
  N-term 5-FAM
  MOD_RES (1)..(1): Beta-Ala
  MOD_RES (5)..(5): Alpha-Me R8-octenyl-alanine olefin amino acid connected by an all-carbon crosslinker comprising one double bond
  misc_feature (5)..(12): Crosslink between residues
  MOD_RES (12)..(12): Alpha-Me S5-pentenyl-alanine olefin amino acid connected by an all-carbon crosslinker comprising one double bond
  MOD_RES (18)..(18): D-amino acid
  C-term NH2
ALTFAEAWAQLAAAAAAA

SEQ ID NO: 1374 - protein, 18 aa, Artificial Sequence
  Description of Artificial Sequence: Synthetic peptide
  N-term 5-FAM
  MOD_RES (1)..(1): Beta-Ala
  MOD_RES (5)..(5): Alpha-Me R8-octenyl-alanine olefin amino acid connected by an all-carbon crosslinker comprising one double bond
  misc_feature (5)..(12): Crosslink between residues
  MOD_RES (12)..(12): Alpha-Me S5-pentenyl-alanine olefin amino acid connected by an all-carbon crosslinker comprising one double bond
  MOD_RES (18)..(18): D-amino acid
  C-term NH2
ALTFAEYAAQLAAAAAAA

SEQ ID NO: 1375 - protein, 18 aa, Artificial Sequence
  Description of Artificial Sequence: Synthetic peptide
  N-term 5-FAM
  MOD_RES (1)..(1): Beta-Ala
  MOD_RES (5)..(5): Alpha-Me R8-octenyl-alanine olefin amino acid connected by an all-carbon crosslinker comprising one double bond
  misc_feature (5)..(12): Crosslink between residues
  MOD_RES (12)..(12): Alpha-Me S5-pentenyl-alanine olefin amino acid connected by an all-carbon crosslinker comprising one double bond
  MOD_RES (18)..(18): D-amino acid
  C-term NH2
ALTAAEYAAQLAAAAAAA

SEQ ID NO: 1376 - protein, 18 aa, Artificial Sequence
  Description of Artificial Sequence: Synthetic peptide
  N-term 5-FAM
  MOD_RES (1)..(1): Beta-Ala
  MOD_RES (5)..(5): Alpha-Me R8-octenyl-alanine olefin amino acid connected by an all-carbon crosslinker comprising one double bond
  misc_feature (5)..(12): Crosslink between residues
  MOD_RES (12)..(12): Alpha-Me S5-pentenyl-alanine olefin amino acid connected by an all-carbon crosslinker comprising one double bond
  MOD_RES (18)..(18): D-amino acid
  C-term NH2
ALTFAEYWAALAAAAAAA

SEQ ID NO: 1377 - protein, 18 aa, Artificial Sequence
  Description of Artificial Sequence: Synthetic peptide
  N-term 5-FAM
  MOD_RES (1)..(1): Beta-Ala
  MOD_RES (5)..(5): Alpha-Me R8-octenyl-alanine olefin amino acid connected by an all-carbon crosslinker comprising one double bond
  misc_feature (5)..(12): Crosslink between residues
  MOD_RES (12)..(12): Alpha-Me S5-pentenyl-alanine olefin amino acid connected by an all-carbon crosslinker comprising one double bond
  MOD_RES (18)..(18): D-amino acid
  C-term NH2
ALTFAEYWAQAAAAAAAA

SEQ ID NO: 1378 - protein, 15 aa, Artificial Sequence
  Description of Artificial Sequence: Synthetic peptide
  N-term 5-FAM
  MOD_RES (1)..(1): Beta-Ala
  MOD_RES (5)..(5): Alpha-Me R8-octenyl-alanine olefin amino acid that is not connected by a crosslinker
  MOD_RES (11)..(11): Cyclobutyl-Ala
  MOD_RES (12)..(12): Alpha-Me S5-pentenyl-alanine olefin amino acid that is not connected by a crosslinker
  C-term NH2
ALTFAEYWAQAASAA

SEQ ID NO: 1379 - protein, 15 aa, Artificial Sequence
  Description of Artificial Sequence: Synthetic peptide
  N-term 5-FAM
  MOD_RES (1)..(1): Beta-Ala
  MOD_RES (5)..(5): Alpha-Me R8-octenyl-alanine olefin amino acid connected by an all-carbon crosslinker comprising one double bond
  misc_feature (5)..(12): Crosslink between residues
  MOD_RES (11)..(11): Cyclobutyl-Ala
  MOD_RES (12)..(12): Alpha-Me S5-pentenyl-alanine olefin amino acid connected by an all-carbon crosslinker comprising one double bond
  C-term NH2
ALTAAEYWAQAASAA

SEQ ID NO: 1380 - protein, 15 aa, Artificial Sequence
  Description of Artificial Sequence: Synthetic peptide
  N-term 5-FAM
  MOD_RES (1)..(1): Beta-Ala
  MOD_RES (5)..(5): Alpha-Me R8-octenyl-alanine olefin amino acid connected by an all-carbon crosslinker comprising one double bond
  misc_feature (5)..(12): Crosslink between residues
  MOD_RES (11)..(11): Cyclobutyl-Ala
  MOD_RES (12)..(12): Alpha-Me S5-pentenyl-alanine olefin amino acid connected by an all-carbon crosslinker comprising one double bond
  C-term NH2
ALTFAEYAAQAASAA

SEQ ID NO: 1381 - protein, 15 aa, Artificial Sequence
  Description of Artificial Sequence: Synthetic peptide
  N-term 5-FAM
  MOD_RES (1)..(1): Beta-Ala
  MOD_RES (5)..(5): Alpha-Me R8-octenyl-alanine olefin amino acid connected by an all-carbon crosslinker comprising one double bond
  misc_feature (5)..(12): Crosslink between residues
  MOD_RES (11)..(11): Cyclobutyl-Ala
  MOD_RES (12)..(12): Alpha-Me S5-pentenyl-alanine olefin amino acid connected by an all-carbon crosslinker comprising one double bond
  C-term NH2
ALTAAEYAAQAASAA

SEQ ID NO: 1382 - protein, 17 aa, Artificial Sequence
  Description of Artificial Sequence: Synthetic peptide
  N-term 5-FAM
  MOD_RES (1)..(1): Beta-Ala
  MOD_RES (8)..(8): Alpha-Me R8-octenyl-alanine olefin amino acid connected by an all-carbon crosslinker comprising one double bond
  misc_feature (8)..(15): Crosslink between residues
  MOD_RES (15)..(15): Alpha-Me S5-pentenyl-alanine olefin amino acid connected by an all-carbon crosslinker comprising one double bond
  C-term NH2
AQSQQTFANLWRLLAQN

SEQ ID NO: 1383 - protein, 15 aa, Artificial Sequence
  Description of Artificial Sequence: Synthetic peptide
  N-term 5-TAMRA
  MOD_RES (1)..(1): Beta-Ala
  MOD_RES (5)..(5): Alpha-Me R8-octenyl-alanine olefin amino acid connected by an all-carbon crosslinker comprising one double bond
  misc_feature (5)..(12): Crosslink between residues
  MOD_RES (11)..(11): Cyclobutyl-Ala
  MOD_RES (12)..(12): Alpha-Me S5-pentenyl-alanine olefin amino acid connected by an all-carbon crosslinker comprising one double bond
  C-term NH2
ALTFAEYWAQAASAA

SEQ ID NO: 1384 - protein, 15 aa, Artificial Sequence
  Description of Artificial Sequence: Synthetic peptide
  N-term 5-TAMRA
  MOD_RES (1)..(1): Beta-Ala
  MOD_RES (5)..(5): Alpha-Me R8-octenyl-alanine olefin amino acid connected by an all-carbon crosslinker comprising one double bond
  misc_feature (5)..(12): Crosslink between residues
  MOD_RES (11)..(11): Cyclobutyl-Ala
  MOD_RES (12)..(12): Alpha-Me S5-pentenyl-alanine olefin amino acid connected by an all-carbon crosslinker comprising one double bond
  C-term NH2
ALTAAEYWAQAASAA

SEQ ID NO: 1385 - protein, 15 aa, Artificial Sequence
  Description of Artificial Sequence: Synthetic peptide
  N-term 5-TAMRA
  MOD_RES (1)..(1): Beta-Ala
  MOD_RES (5)..(5): Alpha-Me R8-octenyl-alanine olefin amino acid connected by an all-carbon crosslinker comprising one double bond
  misc_feature (5)..(12): Crosslink between residues
  MOD_RES (11)..(11): Cyclobutyl-Ala
  MOD_RES (12)..(12): Alpha-Me S5-pentenyl-alanine olefin amino acid connected by an all-carbon crosslinker comprising one double bond
  C-term NH2
ALTFAEYAAQAASAA

SEQ ID NO: 1386 - protein, 15 aa, Artificial Sequence
  Description of Artificial Sequence: Synthetic peptide
  N-term 5-TAMRA
  MOD_RES (1)..(1): Beta-Ala
  MOD_RES (5)..(5): Alpha-Me R8-octenyl-alanine olefin amino acid connected by an all-carbon crosslinker comprising one double bond
  misc_feature (5)..(12): Crosslink between residues
  MOD_RES (11)..(11): Cyclobutyl-Ala
  MOD_RES (12)..(12): Alpha-Me S5-pentenyl-alanine olefin amino acid connected by an all-carbon crosslinker comprising one double bond
  C-term NH2
ALTAAEYAAQAASAA

SEQ ID NO: 1387 - protein, 15 aa, Artificial Sequence
  Description of Artificial Sequence: Synthetic peptide
  N-term 5-TAMRA
  MOD_RES (1)..(1): Beta-Ala
  MOD_RES (5)..(5): Alpha-Me R8-octenyl-alanine olefin amino acid that is not connected by a crosslinker
  MOD_RES (11)..(11): Cyclobutyl-Ala
  MOD_RES (12)..(12): Alpha-Me S5-pentenyl-alanine olefin amino acid that is not connected by a crosslinker
  C-term NH2
ALTFAEYWAQAASAA

SEQ ID NO: 1388 - protein, 18 aa, Artificial Sequence
  Description of Artificial Sequence: Synthetic peptide
  N-term 5-TAMRA
  MOD_RES (1)..(1): Beta-Ala
  MOD_RES (5)..(5): Alpha-Me R8-octenyl-alanine olefin amino acid connected by an all-carbon crosslinker comprising one double bond
  misc_feature (5)..(12): Crosslink between residues
  MOD_RES (12)..(12): Alpha-Me S5-pentenyl-alanine olefin amino acid connected by an all-carbon crosslinker comprising one double bond
  MOD_RES (18)..(18): D-amino acid
  C-term NH2
ALTFAEYWAQLAAAAAAA

SEQ ID NO: 1389 - protein, 18 aa, Artificial Sequence
  Description of Artificial Sequence: Synthetic peptide
  N-term 5-TAMRA
  MOD_RES (1)..(1): Beta-Ala
  MOD_RES (5)..(5): Alpha-Me R8-octenyl-alanine olefin amino acid connected by an all-carbon crosslinker comprising one double bond
  misc_feature (5)..(12): Crosslink between residues
  MOD_RES (12)..(12): Alpha-Me S5-pentenyl-alanine olefin amino acid connected by an all-carbon crosslinker comprising one double bond
  MOD_RES (18)..(18): D-amino acid
  C-term NH2
ALTAAEYWAQLAAAAAAA

SEQ ID NO: 1390 - protein, 18 aa, Artificial Sequence
  Description of Artificial Sequence: Synthetic peptide
  N-term 5-TAMRA
  MOD_RES (1)..(1): Beta-Ala
  MOD_RES (5)..(5): Alpha-Me R8-octenyl-alanine olefin amino acid that is not connected by a crosslinker
  MOD_RES (12)..(12): Alpha-Me S5-pentenyl-alanine olefin amino acid that is not connected by a crosslinker
  MOD_RES (18)..(18): D-amino acid
  C-term NH2
ALTFAEYWAQLAAAAAAA

SEQ ID NO: 1391 - protein, 14 aa, Artificial Sequence
  Description of Artificial Sequence: Synthetic peptide
  N-term Ac
  MOD_RES (4)..(4): Alpha-Me R8-octenyl-alanine olefin amino acid connected by an all-carbon crosslinker comprising one double bond
  misc_feature (4)..(11): Crosslink between residues
  MOD_RES (8)..(8): Cou7
  MOD_RES (10)..(10): Cyclobutyl-Ala
  MOD_RES (11)..(11): Alpha-Me S5-pentenyl-alanine olefin amino acid connected by an all-carbon crosslinker comprising one double bond
  C-term OH
LTFAEYWXQAASAA

SEQ ID NO: 1392 - protein, 12 aa, Artificial Sequence
  Description of Artificial Sequence: Synthetic peptide
  N-term Ac
  MOD_RES (4)..(4): Alpha-Me R8-octenyl-alanine olefin amino acid connected by an all-carbon crosslinker comprising one double bond
  misc_feature (4)..(11): Crosslink between residues
  MOD_RES (8)..(8): Cou7
  MOD_RES (10)..(10): Cyclobutyl-Ala
  MOD_RES (11)..(11): Alpha-Me S5-pentenyl-alanine olefin amino acid connected by an all-carbon crosslinker comprising one double bond
  C-term OH
LTFAEYWXQAAS

SEQ ID NO: 1393 - protein, 14 aa, Artificial Sequence
  Description of Artificial Sequence: Synthetic peptide
  N-term Ac
  MOD_RES (4)..(4): Alpha-Me R8-octenyl-alanine olefin amino acid connected by an all-carbon crosslinker comprising one double bond
  misc_feature (4)..(11): Crosslink between residues
  MOD_RES (8)..(8): Cou7
  MOD_RES (10)..(10): Cyclobutyl-Ala
  MOD_RES (11)..(11): Alpha-Me S5-pentenyl-alanine olefin amino acid connected by an all-carbon crosslinker comprising one double bond
  C-term NH2
LTAAEYWXQAASAA

SEQ ID NO: 1394 - protein, 14 aa, Artificial Sequence
  Description of Artificial Sequence: Synthetic peptide
  N-term Ac
  MOD_RES (4)..(4): Alpha-Me R8-octenyl-alanine olefin amino acid connected by an all-carbon crosslinker comprising one double bond
  misc_feature (4)..(11): Crosslink between residues
  MOD_RES (8)..(8): Cou7
  MOD_RES (10)..(10): Cyclobutyl-Ala
  MOD_RES (11)..(11): Alpha-Me S5-pentenyl-alanine olefin amino acid connected by an all-carbon crosslinker comprising one double bond
  C-term NH2
LTFAEYAXQAASAA

SEQ ID NO: 1395 - protein, 14 aa, Artificial Sequence
  Description of Artificial Sequence: Synthetic peptide
  N-term Ac
  MOD_RES (4)..(4): Alpha-Me R8-octenyl-alanine olefin amino acid connected by an all-carbon crosslinker comprising one double bond
  misc_feature (4)..(11): Crosslink between residues
  MOD_RES (8)..(8): Cou7
  MOD_RES (10)..(10): Cyclobutyl-Ala
  MOD_RES (11)..(11): Alpha-Me S5-pentenyl-alanine olefin amino acid connected by an all-carbon crosslinker comprising one double bond
  C-term NH2
LTAAEYAXQAASAA

SEQ ID NO: 1396 - protein, 14 aa, Artificial Sequence
  Description of Artificial Sequence: Synthetic peptide
  N-term Ac
  MOD_RES (4)..(4): Alpha-Me R8-octenyl-alanine olefin amino acid that is not connected by a crosslinker
  MOD_RES (8)..(8): Cou7
  MOD_RES (10)..(10): Cyclobutyl-Ala
  MOD_RES (11)..(11): Alpha-Me S5-pentenyl-alanine olefin amino acid that is not connected by a crosslinker
  C-term NH2
LTFAEYWXQAASAA

SEQ ID NO: 1397 - protein, 17 aa, Artificial Sequence
  Description of Artificial Sequence: Synthetic peptide
  N-term Ac
  MOD_RES (4)..(4): Alpha-Me R8-octenyl-alanine olefin amino acid connected by an all-carbon crosslinker comprising one double bond
  misc_feature (4)..(11): Crosslink between residues
  MOD_RES (8)..(8): Cou7
  MOD_RES (11)..(11): Alpha-Me S5-pentenyl-alanine olefin amino acid connected by an all-carbon crosslinker comprising one double bond
  MOD_RES (17)..(17): D-amino acid
  C-term NH2
LTFAEYWXQLAAAAAAA

SEQ ID NO: 1398 - protein, 17 aa, Artificial Sequence
  Description of Artificial Sequence: Synthetic peptide
  N-term Ac
  MOD_RES (4)..(4): Alpha-Me R8-octenyl-alanine olefin amino acid that is not connected by a crosslinker
  MOD_RES (8)..(8): Cou7
  MOD_RES (11)..(11): Alpha-Me S5-pentenyl-alanine olefin amino acid that is not connected by a crosslinker
  MOD_RES (17)..(17): D-amino acid
  C-term NH2
LTFAEYWXQLAAAAAAA

SEQ ID NO: 1399 - protein, 16 aa, Artificial Sequence
  Description of Artificial Sequence: Synthetic peptide
  N-term Ac
  MOD_RES (4)..(4): Alpha-Me R8-octenyl-alanine olefin amino acid connected by an all-carbon crosslinker comprising one double bond
  misc_feature (4)..(11): Crosslink between residues
  MOD_RES (8)..(8): Cou7
  MOD_RES (11)..(11): Alpha-Me S5-pentenyl-alanine olefin amino acid connected by an all-carbon crosslinker comprising one double bond
  C-term OH
LTFAEYWXQLAAAAAA

SEQ ID NO: 1400 - protein, 15 aa, Artificial Sequence
  Description of Artificial Sequence: Synthetic peptide
  N-term Ac
  MOD_RES (4)..(4): Alpha-Me R8-octenyl-alanine olefin amino acid connected by an all-carbon crosslinker comprising one double bond
  misc_feature (4)..(11): Crosslink between residues
  MOD_RES (8)..(8): Cou7
  MOD_RES (11)..(11): Alpha-Me S5-pentenyl-alanine olefin amino acid connected by an all-carbon crosslinker comprising one double bond
  C-term OH
LTFAEYWXQLAAAAA

SEQ ID NO: 1401 - protein, 14 aa, Artificial Sequence
  Description of Artificial Sequence: Synthetic peptide
  N-term Ac
  MOD_RES (4)..(4): Alpha-Me R8-octenyl-alanine olefin amino acid connected by an all-carbon crosslinker comprising one double bond
  misc_feature (4)..(11): Crosslink between residues
  MOD_RES (8)..(8): Cou7
  MOD_RES (11)..(11): Alpha-Me S5-pentenyl-alanine olefin amino acid connected by an all-carbon crosslinker comprising one double bond
  C-term OH
LTFAEYWXQLAAAA

SEQ ID NO: 1402 - protein, 13 aa, Artificial Sequence
  Description of Artificial Sequence: Synthetic peptide
  N-term Ac
  MOD_RES (4)..(4): Alpha-Me R8-octenyl-alanine olefin amino acid connected by an all-carbon crosslinker comprising one double bond
  misc_feature (4)..(11): Crosslink between residues
  MOD_RES (8)..(8): Cou7
  MOD_RES (11)..(11): Alpha-Me S5-pentenyl-alanine olefin amino acid connected by an all-carbon crosslinker comprising one double bond
  C-term OH
LTFAEYWXQLAAA

SEQ ID NO: 1403 - protein, 12 aa, Artificial Sequence
  Description of Artificial Sequence: Synthetic peptide
  N-term Ac
  MOD_RES (4)..(4): Alpha-Me R8-octenyl-alanine olefin amino acid connected by an all-carbon crosslinker comprising one double bond
  misc_feature (4)..(11): Crosslink between residues
  MOD_RES (8)..(8): Cou7
  MOD_RES (11)..(11): Alpha-Me S5-pentenyl-alanine olefin amino acid connected by an all-carbon crosslinker comprising one double bond
  C-term OH
LTFAEYWXQLAA

SEQ ID NO: 1404 - protein, 17 aa, Artificial Sequence
  Description of Artificial Sequence: Synthetic peptide
  N-term Ac
  MOD_RES (4)..(4): Alpha-Me R8-octenyl-alanine olefin amino acid connected by an all-carbon crosslinker comprising one double bond
  misc_feature (4)..(11): Crosslink between residues
  MOD_RES (11)..(11): Alpha-Me S5-pentenyl-alanine olefin amino acid connected by an all-carbon crosslinker comprising one double bond
  MOD_RES (17)..(17): D-amino acid
  C-term NH2
LTFAEYWAQLAAAAASA

SEQ ID NO: 1405 - protein, 17 aa, Artificial Sequence
  Description of Artificial Sequence: Synthetic peptide
  N-term Ac
  MOD_RES (4)..(4): Alpha-Me R8-octenyl-alanine olefin amino acid connected by an all-carbon crosslinker comprising one double bond
  misc_feature (4)..(11): Crosslink between residues
  MOD_RES (11)..(11): Alpha-Me S5-pentenyl-alanine olefin amino acid connected by an all-carbon crosslinker comprising one double bond
  MOD_RES (17)..(17): D-amino acid
  C-term NH2
LTFAAYWAALAAAAAAA

SEQ ID NO: 1406 - protein, 18 aa, Artificial Sequence
  Description of Artificial Sequence: Synthetic peptide
  N-term Biotin
  MOD_RES (1)..(1): Beta-Ala
  MOD_RES (5)..(5): Alpha-Me R8-octenyl-alanine olefin amino acid connected by an all-carbon crosslinker comprising one double bond
  misc_feature (5)..(12): Crosslink between residues
  MOD_RES (12)..(12): Alpha-Me S5-pentenyl-alanine olefin amino acid connected by an all-carbon crosslinker comprising one double bond
  MOD_RES (18)..(18): D-amino acid
  C-term NH2
ALTFAEYWAQLAAAAAAA

SEQ ID NO: 1407 - protein, 12 aa, Artificial Sequence
  Description of Artificial Sequence: Synthetic peptide
  N-term Ac
  MOD_RES (4)..(4): Alpha-Me R8-octenyl-alanine olefin amino acid connected by an all-carbon crosslinker comprising one double bond
  misc_feature (4)..(11): Crosslink between residues
  MOD_RES (11)..(11): Alpha-Me S5-pentenyl-alanine olefin amino acid connected by an all-carbon crosslinker comprising one double bond
  C-term NH2
LTFAHAWAQLAS

SEQ ID NO: 1408 - protein, 13 aa, Artificial Sequence
  Description of Artificial Sequence: Synthetic peptide
  N-term Ac
  MOD_RES (4)..(4): Alpha-Me R8-octenyl-alanine olefin amino acid connected by an all-carbon crosslinker comprising one double bond
  misc_feature (4)..(11): Crosslink between residues
  MOD_RES (10)..(10): Cyclobutyl-Ala
  MOD_RES (11)..(11): Alpha-Me S5-pentenyl-alanine olefin amino acid connected by an all-carbon crosslinker comprising one double bond
  C-term NH2
LTFAEYWAQAASA

SEQ ID NO: 1409 - protein, 14 aa, Artificial Sequence
  Description of Artificial Sequence: Synthetic peptide
  N-term Ac
  MOD_RES (4)..(4): Alpha-Me R8-octenyl-alanine olefin amino acid connected by an all-carbon crosslinker comprising one double bond
  misc_feature (4)..(11): Crosslink between residues
  MOD_RES (10)..(10): Cyclobutyl-Ala
  MOD_RES (11)..(11): Alpha-Me S5-pentenyl-alanine olefin amino acid connected by an all-carbon crosslinker comprising one double bond
  C-term NH2
LTFAHYWAQAASAA

SEQ ID NO: 1410 - protein, 14 aa, Artificial Sequence
  Description of Artificial Sequence: Synthetic peptide
  N-term Ac
  MOD_RES (4)..(4): Alpha-Me R8-octenyl-alanine olefin amino acid connected by an all-carbon crosslinker comprising one double bond
  misc_feature (4)..(11): Crosslink between residues
  MOD_RES (10)..(10): Cyclobutyl-Ala
  MOD_RES (11)..(11): Alpha-Me S5-pentenyl-alanine olefin amino acid connected by an all-carbon crosslinker comprising one double bond
  C-term NH2
LTFASYWAQAASAA

SEQ ID NO: 1411 - protein, 14 aa, Artificial Sequence
  Description of Artificial Sequence: Synthetic peptide
  N-term Ac
  MOD_RES (4)..(4): Alpha-Me R8-octenyl-alanine olefin amino acid connected by an all-carbon crosslinker comprising one double bond
  misc_feature (4)..(11): Crosslink between residues
  MOD_RES (10)..(10): Cyclobutyl-Ala
  MOD_RES (11)..(11): Alpha-Me S5-pentenyl-alanine olefin amino acid connected by an all-carbon crosslinker comprising one double bond
  C-term NH2
LTFARYWAQAASAA

SEQ ID NO: 1412 - protein, 14 aa, Artificial Sequence
  Description of Artificial Sequence: Synthetic peptide
  N-term Ac
  MOD_RES (4)..(4): Alpha-Me R8-octenyl-alanine olefin amino acid connected by an all-carbon crosslinker comprising one double bond
  misc_feature (4)..(11): Crosslink between residues
  MOD_RES (10)..(10): Cyclobutyl-Ala
  MOD_RES (11)..(11): Alpha-Me S5-pentenyl-alanine olefin amino acid connected by an all-carbon crosslinker comprising one double bond
  C-term NH2
LTFAKYWAQAASAA

SEQ ID NO: 1413 - protein, 14 aa, Artificial Sequence
  Description of Artificial Sequence: Synthetic peptide
  N-term Ac
  MOD_RES (4)..(4): Alpha-Me R8-octenyl-alanine olefin amino acid connected by an all-carbon crosslinker comprising one double bond
  misc_feature (4)..(11): Crosslink between residues
  MOD_RES (10)..(10): Cyclobutyl-Ala
  MOD_RES (11)..(11): Alpha-Me S5-pentenyl-alanine olefin amino acid connected by an all-carbon crosslinker comprising one double bond
  C-term NH2
LTFAEYWAQAAAAA

SEQ ID NO: 1414 - protein, 19 aa, Artificial Sequence
  Description of Artificial Sequence: Synthetic peptide
  N-term Ac
  MOD_RES (4)..(4): Alpha-Me R8-octenyl-alanine olefin amino acid connected by an all-carbon crosslinker comprising one double bond
  misc_feature (4)..(11): Crosslink between residues
  MOD_RES (11)..(11): Alpha-Me S5-pentenyl-alanine olefin amino acid connected by an all-carbon crosslinker comprising one double bond
  MOD_RES (17)..(17): D-amino acid
  MOD_RES (18)..(18): Beta-Ala
  C-term NH2
LTFAEYWAQLAAAAAAAAC

SEQ ID NO: 1415 - protein, 19 aa, Artificial Sequence
  Description of Artificial Sequence: Synthetic peptide
  N-term Ac
  MOD_RES (4)..(4): Alpha-Me R8-octenyl-alanine olefin amino acid connected by an all-carbon crosslinker comprising one double bond
  misc_feature (4)..(11): Crosslink between residues
  MOD_RES (11)..(11): Alpha-Me S5-pentenyl-alanine olefin amino acid connected by an all-carbon crosslinker comprising one double bond
  MOD_RES (17)..(18): D-amino acid
  MOD_RES (19)..(19): Peg4C
  C-term NH2
LTFAEYWAQLAAAAAAADC

SEQ ID NO: 1416 - protein, 17 aa, Artificial Sequence
  Description of Artificial Sequence: Synthetic peptide
  N-term Ac
  MOD_RES (4)..(4): Alpha-Me R8-octenyl-alanine olefin amino acid connected by an all-carbon crosslinker comprising one double bond
  misc_feature (4)..(11): Crosslink between residues
  MOD_RES (11)..(11): Alpha-Me S5-pentenyl-alanine olefin amino acid connected by an all-carbon crosslinker comprising one double bond
  MOD_RES (17)..(17): D-amino acid
  C-term NH2
LTAAAYWAALAAAAAAA

SEQ ID NO: 1417 - protein, 17 aa, Artificial Sequence
  Description of Artificial Sequence: Synthetic peptide
  N-term Ac
  MOD_RES (4)..(4): Alpha-Me R8-octenyl-alanine olefin amino acid connected by an all-carbon crosslinker comprising one double bond
  misc_feature (4)..(11): Crosslink between residues
  MOD_RES (11)..(11): Alpha-Me S5-pentenyl-alanine olefin amino acid connected by an all-carbon crosslinker comprising one double bond
  MOD_RES (17)..(17): D-amino acid
  C-term NH2
LTFAAYAAALAAAAAAA

SEQ ID NO: 1418 - protein, 18 aa, Artificial Sequence
  Description of Artificial Sequence: Synthetic peptide
  N-term 5-FAM
  MOD_RES (1)..(1): Beta-Ala
  MOD_RES (5)..(5): Alpha-Me R8-octenyl-alanine olefin amino acid connected by an all-carbon crosslinker comprising one double bond
  misc_feature (5)..(12): Crosslink between residues
  MOD_RES (12)..(12): Alpha-Me S5-pentenyl-alanine olefin amino acid connected by an all-carbon crosslinker comprising one double bond
  MOD_RES (18)..(18): D-amino acid
  C-term NH2
ALTFAAYWAALAAAAAAA

SEQ ID NO: 1419 - protein, 17 aa, Artificial Sequence
  Description of Artificial Sequence: Synthetic peptide
  N-term Ac
  MOD_RES (4)..(4): Alpha-Me R8-octenyl-alanine olefin amino acid connected by an all-carbon crosslinker comprising one double bond
  misc_feature (4)..(11): Crosslink between residues
  MOD_RES (11)..(11): Alpha-Me S5-pentenyl-alanine olefin amino acid connected by an all-carbon crosslinker comprising one double bond
  MOD_RES (17)..(17): D-amino acid
  C-term NH2
LTAAAYWAQLAAAAAAA

SEQ ID NO: 1420 - protein, 17 aa, Artificial Sequence
  Description of Artificial Sequence: Synthetic peptide
  N-term Ac
  MOD_RES (4)..(4): Alpha-Me R8-octenyl-alanine olefin amino acid connected by an all-carbon crosslinker comprising one double bond
  misc_feature (4)..(11): Crosslink between residues
  MOD_RES (11)..(11): Alpha-Me S5-pentenyl-alanine olefin amino acid connected by an all-carbon crosslinker comprising one double bond
  MOD_RES (17)..(17): D-amino acid
  C-term NH2
LTFAAYAAQLAAAAAAA

SEQ ID NO: 1421 - protein, 17 aa, Artificial Sequence
  Description of Artificial Sequence: Synthetic peptide
  N-term Ac
  MOD_RES (4)..(4): Alpha-Me R6-hexynyl-alanine alkynyl amino acids, crosslinke via a dialkyne bond with a second alkynyl amino acid
  misc_feature (4)..(11): Crosslink between residues
  MOD_RES (11)..(11): Alpha-Me S5-pentynyl-alanine alkynyl amino acids, wherein the alkyne forms one half of a dialkyne bond with a second alkynyl amino acid
  MOD_RES (17)..(17): D-amino acid
  C-term NH2
LTFAAYWAALAAAAAAA

SEQ ID NO: 1422 - protein, 18 aa, Artificial Sequence
  Description of Artificial Sequence: Synthetic peptide
  N-term FITC
  MOD_RES (1)..(1): Beta-Ala
  MOD_RES (5)..(5): Alpha-Me R8-octenyl-alanine olefin amino acid connected by an all-carbon crosslinker comprising one double bond
  misc_feature (5)..(12): Crosslink between residues
  MOD_RES (12)..(12): Alpha-Me S5-pentenyl-alanine olefin amino acid connected by an all-carbon crosslinker comprising one double bond
  MOD_RES (18)..(18): D-amino acid
  C-term NH2
ALTFAEYWAQLAAAAAAA

SEQ ID NO: 1423 - protein, 15 aa, Artificial Sequence
  Description of Artificial Sequence: Synthetic peptide
  N-term FITC
  MOD_RES (1)..(1): Beta-Ala
  MOD_RES (5)..(5): Alpha-Me R8-octenyl-alanine olefin amino acid connected by an all-carbon crosslinker comprising one double bond
  misc_feature (5)..(12): Crosslink between residues
  MOD_RES (11)..(11): Cyclobutyl-Ala
  MOD_RES (12)..(12): Alpha-Me S5-pentenyl-alanine olefin amino acid connected by an all-carbon crosslinker comprising one double bond
  C-term NH2
ALTFAEYWAQAASAA

SEQ ID NO: 1424 - protein, 17 aa, Artificial Sequence
  Description of Artificial Sequence: Synthetic peptide
  N-term Ac
  MOD_RES (4)..(4): Alpha-Me R8-octenyl-alanine olefin amino acid connected by an all-carbon crosslinker comprising one double bond
  misc_feature (4)..(11): Crosslink between residues
  MOD_RES (11)..(11): Alpha-Me S5-pentenyl-alanine olefin amino acid connected by an all-carbon crosslinker comprising one double bond
  MOD_RES (17)..(17): D-amino acid
  C-term NH2
LTFAEYWAQLAEAAAAA

SEQ ID NO: 1425 - protein, 17 aa, Artificial Sequence
  Description of Artificial Sequence: Synthetic peptide
  N-term Ac
  MOD_RES (4)..(4): Alpha-Me R8-octenyl-alanine olefin amino acid connected by an all-carbon crosslinker comprising one double bond
  misc_feature (4)..(11): Crosslink between residues
  MOD_RES (11)..(11): Alpha-Me S5-pentenyl-alanine olefin amino acid connected by an all-carbon crosslinker comprising one double bond
  MOD_RES (17)..(17): D-amino acid
  C-term NH2
LTFAAYWAQLAEAAAAA

SEQ ID NO: 1426 - protein, 19 aa, Artificial Sequence
  Description of Artificial Sequence: Synthetic peptide
  N-term Ac
  MOD_RES (4)..(4): Alpha-Me R8-octenyl-alanine olefin amino acid connected by an all-carbon crosslinker comprising one double bond
  misc_feature (4)..(11): Crosslink between residues
  MOD_RES (11)..(11): Alpha-Me S5-pentenyl-alanine olefin amino acid connected by an all-carbon crosslinker comprising one double bond
  MOD_RES (17)..(17): D-amino acid
  MOD_RES (18)..(18): Beta-Ala
  MOD_RES (19)..(19): Lys-bio
  C-term NH2
LTFAEYWAQLAAAAAAAAK

SEQ ID NO: 1427 - protein, 17 aa, Artificial Sequence
  Description of Artificial Sequence: Synthetic peptide
  N-term Ac
  MOD_RES (4)..(4): Alpha-Me R8-octenyl-alanine olefin amino acid connected by an all-carbon crosslinker comprising one double bond
  misc_feature (4)..(11): Crosslink between residues
  MOD_RES (11)..(11): Alpha-Me S5-pentenyl-alanine olefin amino acid connected by an all-carbon crosslinker comprising one double bond
  MOD_RES (17)..(17): D-amino acid
  C-term NH2
LTFAAYWAALAAAAAAA

SEQ ID NO: 1428 - protein, 17 aa, Artificial Sequence
  Description of Artificial Sequence: Synthetic peptide
  N-term Ac
  MOD_RES (4)..(4): Alpha-Me R8-octenyl-alanine olefin amino acid connected by an all-carbon crosslinker comprising one double bond
  misc_feature (4)..(11): Crosslink between residues
  MOD_RES (11)..(11): Alpha-Me S5-pentenyl-alanine olefin amino acid connected by an all-carbon crosslinker comprising one double bond
  MOD_RES (17)..(17): D-amino acid
  C-term NH2
LTFAAYAAALAAAAAAA

SEQ ID NO: 1429 - protein, 17 aa, Artificial Sequence
  Description of Artificial Sequence: Synthetic peptide
  N-term Ac
  MOD_RES (4)..(4): Alpha-Me R8-octenyl-alanine olefin amino acid connected by an all-carbon crosslinker comprising one double bond
  misc_feature (4)..(11): Crosslink between residues
  MOD_RES (11)..(11): Alpha-Me S5-pentenyl-alanine olefin amino acid connected by an all-carbon crosslinker comprising one double bond
  MOD_RES (17)..(17): D-amino acid
  C-term NH2
LTFAAYAAQLAAAAAAA

SEQ ID NO: 1430 - protein, 17 aa, Artificial Sequence
  Description of Artificial Sequence: Synthetic peptide
  N-term Ac
  MOD_RES (4)..(4): Alpha-Me R8-octenyl-alanine olefin amino acid connected by an all-carbon crosslinker comprising one double bond
  misc_feature (4)..(11): Crosslink between residues
  MOD_RES (11)..(11): Alpha-Me S5-pentenyl-alanine olefin amino acid connected by an all-carbon crosslinker comprising one double bond
  MOD_RES (17)..(17): D-amino acid
  C-term NH2
LTFAEYWAQLAEAAAAA

SEQ ID NO: 1431 - protein, 17 aa, Artificial Sequence
  Description of Artificial Sequence: Synthetic peptide
  N-term Ac
  MOD_RES (4)..(4): Alpha-Me R8-octenyl-alanine olefin amino acid connected by an all-carbon crosslinker comprising one double bond
  misc_feature (4)..(11): Crosslink between residues
  MOD_RES (11)..(11): Alpha-Me S5-pentenyl-alanine olefin amino acid connected by an all-carbon crosslinker comprising one double bond
  MOD_RES (17)..(17): D-amino acid
  C-term NH2
LTFAAYWAQLAEAAAAA

SEQ ID NO: 1432 - protein, 17 aa, Artificial Sequence
  Description of Artificial Sequence: Synthetic peptide
  N-term Ac
  MOD_RES (4)..(4): Alpha-Me R8-octenyl-alanine olefin amino acid connected by an all-carbon crosslinker comprising one double bond
  misc_feature (4)..(11): Crosslink between residues
  MOD_RES (10)..(10): Cyclobutyl-Ala
  MOD_RES (11)..(11): Alpha-Me S5-pentenyl-alanine olefin amino acid connected by an all-carbon crosslinker comprising one double bond
  MOD_RES (17)..(17): D-amino acid
  C-term NH2
LTFAEYWAQAASAAAAA

SEQ ID NO: 1433 - protein, 17 aa, Artificial Sequence
  Description of Artificial Sequence: Synthetic peptide
  N-term Ac
  MOD_RES (4)..(4): Alpha-Me R8-octenyl-alanine olefin amino acid connected by an all-carbon crosslinker comprising one double bond
  misc_feature (4)..(15): Crosslink between residues
  MOD_RES (11)..(11): Two pentenyl-alanine olefin side chains, each of which is crosslinked to another amino acid as indicated
  MOD_RES (15)..(15): Alpha-Me R5-pentenyl-alanine olefin amino acid connected by an all-carbon crosslinker comprising one double bond
  C-term NH2
LTFAEYWAQLAAAAAAA

SEQ ID NO: 1434 - protein, 18 aa, Artificial Sequence
  Description of Artificial Sequence: Synthetic peptide
  N-term Ac
  MOD_RES (4)..(4): Alpha-Me R8-octenyl-alanine olefin amino acid connected by an all-carbon crosslinker comprising one double bond
  misc_feature (4)..(11): Crosslink between residues
  MOD_RES (11)..(11): Alpha-Me S5-pentenyl-alanine olefin amino acid connected by an all-carbon crosslinker comprising one double bond
  MOD_RES (13)..(13): Alpha-Me S5-pentenyl-alanine olefin amino acid connected by an all-carbon crosslinker comprising one double bond
  misc_feature (13)..(17): Crosslink between residues
  MOD_RES (17)..(17): Alpha-Me S5-pentenyl-alanine olefin amino acid connected by an all-carbon crosslinker comprising one double bond
  C-term NH2
LTFAEYWAQLAAAAAAAA

SEQ ID NO: 1435 - protein, 19 aa, Artificial Sequence
  Description of Artificial Sequence: Synthetic peptide
  N-term Ac
  MOD_RES (4)..(4): Alpha-Me R8-octenyl-alanine olefin amino acid connected by an all-carbon crosslinker comprising one double bond
  misc_feature (4)..(11): Crosslink between residues
  MOD_RES (11)..(11): Alpha-Me S5-pentenyl-alanine olefin amino acid connected by an all-carbon crosslinker comprising one double bond
  MOD_RES (14)..(14): Alpha-Me S5-pentenyl-alanine olefin amino acid connected by an all-carbon crosslinker comprising one double bond
  misc_feature (14)..(18): Crosslink between residues
  MOD_RES (18)..(18): Alpha-Me S5-pentenyl-alanine olefin amino acid connected by an all-carbon crosslinker comprising one double bond
  C-term NH2
LTFAEYWAQLAAAAAAAAA

SEQ ID NO: 1436 - protein, 20 aa, Artificial Sequence
  Description of Artificial Sequence: Synthetic peptide
  N-term Ac
  MOD_RES (4)..(4): Alpha-Me R8-octenyl-alanine olefin amino acid connected by an all-carbon crosslinker comprising one double bond
  misc_feature (4)..(11): Crosslink between residues
  MOD_RES (11)..(11): Alpha-Me S5-pentenyl-alanine olefin amino acid connected by an all-carbon crosslinker comprising one double bond
  MOD_RES (15)..(15): Alpha-Me S5-pentenyl-alanine olefin amino acid connected by an all-carbon crosslinker comprising one double bond
  misc_feature (15)..(19): Crosslink between residues
  MOD_RES (19)..(19): Alpha-Me S5-pentenyl-alanine olefin amino acid connected by an all-carbon crosslinker comprising one double bond
  C-term NH2
LTFAEYWAQLAAAAAAAAAA

SEQ ID NO: 1437 - protein, 17 aa, Artificial Sequence
  Description of Artificial Sequence: Synthetic peptide
  N-term Ac
  MOD_RES (7)..(7): Alpha-Me R8-octenyl-alanine olefin amino acid connected by an all-carbon crosslinker comprising one double bond
  misc_feature (7)..(14): Crosslink between residues
  MOD_RES (14)..(14): Alpha-Me S5-pentenyl-alanine olefin amino acid connected by an all-carbon crosslinker comprising one double bond
  C-term OH
AAALTFAEYWAQLAAAA

SEQ ID NO: 1438 - protein, 17 aa, Artificial Sequence
  Description of Artificial Sequence: Synthetic peptide
  N-term Ac
  MOD_RES (7)..(7): Alpha-Me R8-octenyl-alanine olefin amino acid connected by an all-carbon crosslinker comprising one double bond
  misc_feature (7)..(14): Crosslink between residues
  MOD_RES (14)..(14): Alpha-Me S5-pentenyl-alanine olefin amino acid connected by an all-carbon crosslinker comprising one double bond
  C-term NH2
AAALTFAEYWAQLAAAA

SEQ ID NO: 1439 - protein, 18 aa, Artificial Sequence
  Description of Artificial Sequence: Synthetic peptide
  N-term Ac
  MOD_RES (8)..(8): Alpha-Me R8-octenyl-alanine olefin amino acid connected by an all-carbon crosslinker comprising one double bond
  misc_feature (8)..(15): Crosslink between residues
  MOD_RES (15)..(15): Alpha-Me S5-pentenyl-alanine olefin amino acid connected by an all-carbon crosslinker comprising one double bond
  C-term NH2
AAAALTFAEYWAQLAAAA

SEQ ID NO: 1440 - protein, 19 aa, Artificial Sequence
  Description of Artificial Sequence: Synthetic peptide
  N-term Ac
  MOD_RES (9)..(9): Alpha-Me R8-octenyl-alanine olefin amino acid connected by an all-carbon crosslinker comprising one double bond
  misc_feature (9)..(16): Crosslink between residues
  MOD_RES (16)..(16): Alpha-Me S5-pentenyl-alanine olefin amino acid connected by an all-carbon crosslinker comprising one double bond
  C-term NH2
AAAAALTFAEYWAQLAAAA

SEQ ID NO: 1441 - protein, 20 aa, Artificial Sequence
  Description of Artificial Sequence: Synthetic peptide
  N-term Ac
  MOD_RES (10)..(10): Alpha-Me R8-octenyl-alanine olefin amino acid connected by an all-carbon crosslinker comprising one double bond
  misc_feature (10)..(17): Crosslink between residues
  MOD_RES (17)..(17): Alpha-Me S5-pentenyl-alanine olefin amino acid connected by an all-carbon crosslinker comprising one double bond
  C-term NH2
AAAAAALTFAEYWAQLAAAA

SEQ ID NO: 1442 - protein, 14 aa, Artificial Sequence
  Description of Artificial Sequence: Synthetic peptide
  N-term Ac
  MOD_RES (4)..(4): Alpha-Me R6-hexynyl-alanine alkynyl amino acids, crosslinke via a dialkyne bond with a second alkynyl amino acid
  misc_feature (4)..(11): Crosslink between residues
  MOD_RES (10)..(10): Cyclobutyl-Ala
  MOD_RES (11)..(11): Alpha-Me S6-hexynyl-alanine alkynyl amino acid wherein the alkyne forms one half of a dialkyne bond with a second alkynyl amino acid
  C-term NH2
LTFAEYWAQAASAA

SEQ ID NO: 1443 - protein, 12 aa, Artificial Sequence
  Description of Artificial Sequence: Synthetic peptide
  N-term Ac
  MOD_RES (1)..(1): D-amino acid
  MOD_RES (2)..(2): Alpha-Me R5-pentenyl-alanine olefin amino acid connected by an all-carbon crosslinker comprising one double bond
  misc_feature (2)..(6): Crosslink between residues
  MOD_RES (3)..(5): D-amino acid
  MOD_RES (6)..(6): Alpha-Me R5-pentenyl-alanine olefin amino acid connected by an all-carbon crosslinker comprising one double bond
  MOD_RES (7)..(7): D-Phe-4CF3
  MOD_RES (8)..(12): D-amino acid
  C-term NH2
TAWYAAFEKLLR

SEQ ID NO: 1444 - protein, 12 aa, Artificial Sequence
  Description of Artificial Sequence: Synthetic peptide
  N-term Ac
  MOD_RES (1)..(4): D-amino acid
  MOD_RES (5)..(5): Alpha-Me R5-pentenyl-alanine olefin amino acid connected by an all-carbon crosslinker comprising one double bond
  misc_feature (5)..(9): Crosslink between residues
  MOD_RES (6)..(6): D-amino acid
  MOD_RES (7)..(7): D-Phe-4CF3
  MOD_RES (8)..(8): D-amino acid
  MOD_RES (9)..(9): Alpha-Me R5-pentenyl-alanine olefin amino acid connected by an all-carbon crosslinker comprising one double bond
  MOD_RES (10)..(12): D-amino acid
  C-term NH2
TAWYANFEALLR

SEQ ID NO: 1445 - protein, 12 aa, Artificial Sequence
  Description of Artificial Sequence: Synthetic peptide
  N-term Ac
  MOD_RES (1)..(5): D-amino acid
  MOD_RES (6)..(6): Alpha-Me R5-pentenyl-alanine olefin amino acid connected by an all-carbon crosslinker comprising one double bond
  misc_feature (6)..(10): Crosslink between residues
  MOD_RES (7)..(7): D-Phe-4CF3
  MOD_RES (8)..(9): D-amino acid
  MOD_RES (10)..(10): Alpha-Me R5-pentenyl-alanine olefin amino acid connected by an all-carbon crosslinker comprising one double bond
  MOD_RES (11)..(12): D-amino acid
  C-term NH2
TAWYAAFEKALR

SEQ ID NO: 1446 - protein, 14 aa, Artificial Sequence
  Description of Artificial Sequence: Synthetic peptide
  N-term Ac
  MOD_RES (1)..(6): D-amino acid
  MOD_RES (7)..(7): D-Phe-4CF3
  MOD_RES (8)..(8): D-amino acid
  MOD_RES (9)..(9): Alpha-Me R5-pentenyl-alanine olefin amino acid connected by an all-carbon crosslinker comprising one double bond
  misc_feature (9)..(13): Crosslink between residues
  MOD_RES (10)..(12): D-amino acid
  MOD_RES (13)..(13): Alpha-Me R5-pentenyl-alanine olefin amino acid connected by an all-carbon crosslinker comprising one double bond
  MOD_RES (14)..(14): D-amino acid
  C-term NH2
TAWYANFEALLRAA

SEQ ID NO: 1447 - protein, 12 aa, Artificial Sequence
  Description of Artificial Sequence: Synthetic peptide
  N-term Ac
  MOD_RES (1)..(1): D-amino acid
  MOD_RES (2)..(2): Alpha-Me S8-octenyl-alanine olefin amino acid connected by an all-carbon crosslinker comprising one double bond
  misc_feature (2)..(9): Crosslink between residues
  MOD_RES (3)..(6): D-amino acid
  MOD_RES (7)..(7): D-Phe-4CF3
  MOD_RES (8)..(8): D-amino acid
  MOD_RES (9)..(9): Alpha-Me R5-pentenyl-alanine olefin amino acid connected by an all-carbon crosslinker comprising one double bond
  MOD_RES (10)..(12): D-amino acid
  C-term NH2
TAWYANFEALLR

SEQ ID NO: 1448 - protein, 13 aa, Artificial Sequence
  Description of Artificial Sequence: Synthetic peptide
  N-term Ac
  MOD_RES (1)..(4): D-amino acid
  MOD_RES (5)..(5): Alpha-Me S8-octenyl-alanine olefin amino acid connected by an all-carbon crosslinker comprising one double bond
  misc_feature (5)..(12): Crosslink between residues
  MOD_RES (6)..(6): D-amino acid
  MOD_RES (7)..(7): D-Phe-4CF3
  MOD_RES (8)..(11): D-amino acid
  MOD_RES (12)..(12): Alpha-Me R5-pentenyl-alanine olefin amino acid connected by an all-carbon crosslinker comprising one double bond
  MOD_RES (13)..(13): D-amino acid
  C-term NH2
TAWYANFEKLLAA

SEQ ID NO: 1449 - protein, 14 aa, Artificial Sequence
  Description of Artificial Sequence: Synthetic peptide
  N-term Ac
  MOD_RES (1)..(5): D-amino acid
  MOD_RES (6)..(6): Alpha-Me S8-octenyl-alanine olefin amino acid connected by an all-carbon crosslinker comprising one double bond
  misc_feature (6)..(13): Crosslink between residues
  MOD_RES (7)..(7): D-Phe-4CF3
  MOD_RES (8)..(12): D-amino acid
  MOD_RES (13)..(13): Alpha-Me R5-pentenyl-alanine olefin amino acid connected by an all-carbon crosslinker comprising one double bond
  MOD_RES (14)..(14): D-amino acid
  C-term NH2
TAWYAAFEKLLRAA

SEQ ID NO: 1450 - protein, 13 aa, Artificial Sequence
  Description of Artificial Sequence: Synthetic peptide
  N-term Ac
  MOD_RES (1)..(4): D-amino acid
  MOD_RES (5)..(5): Alpha-Me S8-octenyl-alanine olefin amino acid connected by an all-carbon crosslinker comprising one double bond
  misc_feature (5)..(12): Crosslink between residues
  MOD_RES (6)..(11): D-amino acid
  MOD_RES (12)..(12): Alpha-Me R5-pentenyl-alanine olefin amino acid connected by an all-carbon crosslinker comprising one double bond
  MOD_RES (13)..(13): D-amino acid
  C-term NH2
TAWYANAEKLLAA

SEQ ID NO: 1451 - protein, 14 aa, Artificial Sequence
  Description of Artificial Sequence: Synthetic peptide
  N-term 5-FAM
  MOD_RES (1)..(1): Beta-Ala
  MOD_RES (2)..(5): D-amino acid
  MOD_RES (6)..(6): Alpha-Me S8-octenyl-alanine olefin amino acid connected by an all-carbon crosslinker comprising one double bond
  misc_feature (6)..(13): Crosslink between residues
  MOD_RES (7)..(7): D-amino acid
  MOD_RES (8)..(8): D-Phe-4CF3
  MOD_RES (9)..(12): D-amino acid
  MOD_RES (13)..(13): Alpha-Me R5-pentenyl-alanine olefin amino acid connected by an all-carbon crosslinker comprising one double bond
  MOD_RES (14)..(14): D-amino acid
  C-term NH2
ATAWYANFEKLLAA

SEQ ID NO: 1452 - protein, 14 aa, Artificial Sequence
  Description of Artificial Sequence: Synthetic peptide
  N-term 5-FAM
  MOD_RES (1)..(1): Beta-Ala
  MOD_RES (2)..(5): D-amino acid
  MOD_RES (6)..(6): Alpha-Me S8-octenyl-alanine olefin amino acid connected by an all-carbon crosslinker comprising one double bond
  misc_feature (6)..(13): Crosslink between residues
  MOD_RES (7)..(12): D-amino acid
  MOD_RES (13)..(13): Alpha-Me R5-pentenyl-alanine olefin amino acid connected by an all-carbon crosslinker comprising one double bond
  MOD_RES (14)..(14): D-amino acid
  C-term NH2
ATAWYANAEKLLAA

SEQ ID NO: 1453 - protein, 13 aa, Artificial Sequence
  Description of Artificial Sequence: Synthetic peptide
  N-term Ac
  MOD_RES (1)..(4): D-amino acid
  MOD_RES (5)..(5): Alpha-Me S8-octenyl-alanine olefin amino acid connected by an all-carbon crosslinker comprising one double bond
  misc_feature (5)..(12): Crosslink between residues
  MOD_RES (6)..(6): D-amino acid
  MOD_RES (7)..(7): D-Phe-4CF3
  MOD_RES (8)..(11): D-amino acid
  MOD_RES (12)..(12): Alpha-Me R5-pentenyl-alanine olefin amino acid connected by an all-carbon crosslinker comprising one double bond
  MOD_RES (13)..(13): D-amino acid
  C-term NH2
TAWYANFEALLAA

SEQ ID NO: 1454 - protein, 17 aa, Artificial Sequence
  Description of Artificial Sequence: Synthetic peptide
  N-term Ac
  MOD_RES (1)..(4): D-amino acid
  MOD_RES (5)..(5): Alpha-Me S8-octenyl-alanine olefin amino acid connected by an all-carbon crosslinker comprising one double bond
  misc_feature (5)..(12): Crosslink between residues
  MOD_RES (6)..(6): D-amino acid
  MOD_RES (7)..(7): D-Phe-4CF3
  MOD_RES (8)..(11): D-amino acid
  MOD_RES (12)..(12): Alpha-Me R5-pentenyl-alanine olefin amino acid connected by an all-carbon crosslinker comprising one double bond
  MOD_RES (13)..(17): D-amino acid
  C-term NH2
TAWYANFEKLLAAAAAA

SEQ ID NO: 1455 - protein, 17 aa, Artificial Sequence
  Description of Artificial Sequence: Synthetic peptide
  N-term Ac
  MOD_RES (1)..(4): D-amino acid
  MOD_RES (5)..(5): Alpha-Me S8-octenyl-alanine olefin amino acid connected by an all-carbon crosslinker comprising one double bond
  misc_feature (5)..(12): Crosslink between residues
  MOD_RES (6)..(6): D-amino acid
  MOD_RES (7)..(7): D-Phe-4CF3
  MOD_RES (8)..(11): D-amino acid
  MOD_RES (12)..(12): Alpha-Me R5-pentenyl-alanine olefin amino acid connected by an all-carbon crosslinker comprising one double bond
  MOD_RES (13)..(17): D-amino acid
  C-term NH2
TAWYANFEALLAAAAAA

SEQ ID NO: 1456 - protein, 15 aa, Artificial Sequence
  Description of Artificial Sequence: Synthetic peptide
  N-term Ac
  MOD_RES (4)..(4): Alpha-Me R8-octenyl-alanine olefin amino acid connected by an all-carbon crosslinker comprising one double bond
  misc_feature (4)..(11): Crosslink between residues
  MOD_RES (6)..(6): 4-carboxy Phe
  MOD_RES (10)..(10): Cyclobutyl-Ala
  MOD_RES (11)..(11): Alpha-Me S5-pentenyl-alanine olefin amino acid connected by an all-carbon crosslinker comprising one double bond
  MOD_RES (14)..(14): Norleucine
  C-term NH2
LTFAEFWAQAASALA

SEQ ID NO: 1457 - protein, 17 aa, Artificial Sequence
  Description of Artificial Sequence: Synthetic peptide
  N-term Ac
  MOD_RES (4)..(4): Alpha-Me R8-octenyl-alanine olefin amino acid connected by an all-carbon crosslinker comprising one double bond
  misc_feature (4)..(11): Crosslink between residues
  MOD_RES (11)..(11): Alpha-Me S5-pentenyl-alanine olefin amino acid connected by an all-carbon crosslinker comprising one double bond
  MOD_RES (17)..(17): D-amino acid
  C-term NH2
LTFAEYWAQLAAAAAAA

SEQ ID NO: 1458 - protein, 17 aa, Artificial Sequence
  Description of Artificial Sequence: Synthetic peptide
  N-term Ac
  MOD_RES (4)..(4): Alpha-Me R8-octenyl-alanine olefin amino acid connected by an all-carbon crosslinker comprising one double bond
  misc_feature (4)..(11): Crosslink between residues
  MOD_RES (7)..(7): 6cl-Trp
  MOD_RES (11)..(11): Alpha-Me S5-pentenyl-alanine olefin amino acid connected by an all-carbon crosslinker comprising one double bond
  MOD_RES (17)..(17): D-amino acid
  C-term NH2
LTFAEYWAQLAAAAAAA

SEQ ID NO: 1459 - protein, 20 aa, Artificial Sequence
  Description of Artificial Sequence: Synthetic peptide
  N-term Ac
  MOD_RES (7)..(7): Alpha-Me R8-octenyl-alanine olefin amino acid connected by an all-carbon crosslinker comprising one double bond
  misc_feature (7)..(14): Crosslink between residues
  MOD_RES (14)..(14): Alpha-Me S5-pentenyl-alanine olefin amino acid connected by an all-carbon crosslinker comprising one double bond
  MOD_RES (20)..(20): D-amino acid
  C-term NH2
AAALTFAEYWAQLAAAAAAA

SEQ ID NO: 1460 - protein, 17 aa, Artificial Sequence
  Description of Artificial Sequence: Synthetic peptide
  N-term Ac
  MOD_RES (3)..(3): 3,4-difluoro Phe
  MOD_RES (4)..(4): Alpha-Me R8-octenyl-alanine olefin amino acid connected by an all-carbon crosslinker comprising one double bond
  misc_feature (4)..(11): Crosslink between residues
  MOD_RES (11)..(11): Alpha-Me S5-pentenyl-alanine olefin amino acid connected by an all-carbon crosslinker comprising one double bond
  MOD_RES (17)..(17): D-amino acid
  C-term NH2
LTFAEYWAQLAAAAAAA

SEQ ID NO: 1461 - protein, 17 aa, Artificial Sequence
  Description of Artificial Sequence: Synthetic peptide
  N-term Ac
  MOD_RES (4)..(4): Alpha-Me R8-octenyl-alanine olefin amino acid connected by an all-carbon crosslinker comprising one double bond
  misc_feature (4)..(11): Crosslink between residues
  MOD_RES (11)..(11): Alpha-Me S5-pentenyl-alanine olefin amino acid connected by an all-carbon crosslinker comprising one double bond
  MOD_RES (13)..(13): 2-aminoisobutyric acid
  MOD_RES (17)..(17): D-amino acid
  C-term NH2
LTFAEYWAQLAAXAAAA

SEQ ID NO: 1462 - protein, 17 aa, Artificial Sequence
  Description of Artificial Sequence: Synthetic peptide
  N-term Ac
  MOD_RES (4)..(4): Alpha-Me R8-octenyl-alanine olefin amino acid connected by an all-carbon crosslinker comprising one double bond
  misc_feature (4)..(11): Crosslink between residues
  MOD_RES (11)..(11): Alpha-Me S5-pentenyl-alanine olefin amino acid connected by an all-carbon crosslinker comprising one double bond
  MOD_RES (15)..(15): 2-aminoisobutyric acid
  MOD_RES (17)..(17): D-amino acid
  C-term NH2
LTFAEYWAQLAAAAXAA

SEQ ID NO: 1463 - protein, 17 aa, Artificial Sequence
  Description of Artificial Sequence: Synthetic peptide
  N-term Ac
  MOD_RES (4)..(4): Alpha-Me R8-octenyl-alanine olefin amino acid connected by an all-carbon crosslinker comprising one double bond
  misc_feature (4)..(11): Crosslink between residues
  MOD_RES (11)..(11): Alpha-Me S5-pentenyl-alanine olefin amino acid connected by an all-carbon crosslinker comprising one double bond
  MOD_RES (16)..(16): 2-aminoisobutyric acid
  MOD_RES (17)..(17): D-amino acid
  C-term NH2
LTFAEYWAQLAAAAAXA

SEQ ID NO: 1464 - protein, 17 aa, Artificial Sequence
  Description of Artificial Sequence: Synthetic peptide
  N-term Ac
  MOD_RES (4)..(4): Alpha-Me R8-octenyl-alanine olefin amino acid connected by an all-carbon crosslinker comprising one double bond
  misc_feature (4)..(11): Crosslink between residues
  MOD_RES (11)..(11): Alpha-Me S5-pentenyl-alanine olefin amino acid connected by an all-carbon crosslinker comprising one double bond
  MOD_RES (17)..(17): 2-aminoisobutyric acid
  C-term NH2
LTFAEYWAQLAAAAAAX

SEQ ID NO: 1465 - protein, 17 aa, Artificial Sequence
  Description of Artificial Sequence: Synthetic peptide
  N-term Ac
  MOD_RES (4)..(4): Alpha-Me R8-octenyl-alanine olefin amino acid connected by an all-carbon crosslinker comprising one double bond
  misc_feature (4)..(11): Crosslink between residues
  MOD_RES (11)..(11): Alpha-Me S5-pentenyl-alanine olefin amino acid connected by an all-carbon crosslinker comprising one double bond
  MOD_RES (16)..(17): D-amino acid
  C-term NH2
LTFAEYWAQLAAAAAAA

SEQ ID NO: 1466 - protein, 17 aa, Artificial Sequence
  Description of Artificial Sequence: Synthetic peptide
  N-term Ac
  MOD_RES (4)..(4): Alpha-Me R8-octenyl-alanine olefin amino acid connected by an all-carbon crosslinker comprising one double bond
  misc_feature (4)..(11): Crosslink between residues
  MOD_RES (11)..(11): Alpha-Me S5-pentenyl-alanine olefin amino acid connected by an all-carbon crosslinker comprising one double bond
  C-term NH2
LTFAEYWAQLAAAAAAA

SEQ ID NO: 1467 - protein, 17 aa, Artificial Sequence
  Description of Artificial Sequence: Synthetic peptide
  N-term Ac
  MOD_RES (4)..(4): Alpha-Me R8-octenyl-alanine olefin amino acid connected by an all-carbon crosslinker comprising one double bond
  misc_feature (4)..(11): Crosslink between residues
  MOD_RES (11)..(11): Alpha-Me S5-pentenyl-alanine olefin amino acid connected by an all-carbon crosslinker comprising one double bond
  MOD_RES (17)..(17): Sarcosine
  C-term NH2
LTFAEYWAQLAAAAAAX

SEQ ID NO: 1468 - protein, 17 aa, Artificial Sequence
  Description of Artificial Sequence: Synthetic peptide
  N-term Ac
  MOD_RES (4)..(4): Alpha-Me R8-octenyl-alanine olefin amino acid connected by an all-carbon crosslinker comprising one double bond
  misc_feature (4)..(11): Crosslink between residues
  MOD_RES (11)..(11): Alpha-Me S5-pentenyl-alanine olefin amino acid connected by an all-carbon crosslinker comprising one double bond
  MOD_RES (17)..(17): D-amino acid
  C-term OH
LTFAEYWAQLAAAAAAA

SEQ ID NO: 1469 - protein, 17 aa, Artificial Sequence
  Description of Artificial Sequence: Synthetic peptide
  N-term Ac
  MOD_RES (4)..(4): Alpha-Me R6-hexynyl-alanine alkynyl amino acids, crosslinke via a dialkyne bond with a second alkynyl amino acid
  misc_feature (4)..(11): Crosslink between residues
  MOD_RES (11)..(11): Alpha-Me S5-pentynyl-alanine alkynyl amino acids, wherein the alkyne forms one half of a dialkyne bond with a second alkynyl amino acid
  MOD_RES (17)..(17): D-amino acid
  C-term NH2
LTFAAYWAQLAAAAAAA

SEQ ID NO: 1470 - protein, 15 aa, Artificial Sequence
  Description of Artificial Sequence: Synthetic peptide
  N-term 5-FAM
  MOD_RES (1)..(1): Beta-Ala
  MOD_RES (5)..(5): Alpha-Me R8-octenyl-alanine olefin amino acid connected by an all-carbon crosslinker comprising one double bond
  misc_feature (5)..(12): Crosslink between residues
  MOD_RES (11)..(11): Cyclobutyl-Ala
  MOD_RES (12)..(12): Alpha-Me S5-pentenyl-alanine olefin amino acid connected by an all-carbon crosslinker comprising one double bond
  C-term NH2
ALTFAEYWAQAASAA

SEQ ID NO: 1471 - protein, 17 aa, Artificial Sequence
  Description of Artificial Sequence: Synthetic peptide
  N-term Ac
  MOD_RES (4)..(4): Alpha-Me R8-octenyl-alanine olefin amino acid connected by an all-carbon crosslinker comprising one double bond
  misc_feature (4)..(11): Crosslink between residues
  MOD_RES (6)..(6): 4-carboxy Phe
  MOD_RES (10)..(10): Cyclobutyl-Ala
  MOD_RES (11)..(11): Alpha-Me S5-pentenyl-alanine olefin amino acid connected by an all-carbon crosslinker comprising one double bond
  MOD_RES (17)..(17): D-amino acid
  C-term NH2
LTFAEFWAQAAAAAAAA

SEQ ID NO: 1472 - protein, 17 aa, Artificial Sequence
  Description of Artificial Sequence: Synthetic peptide
  N-term Ac
  MOD_RES (4)..(4): Alpha-Me R8-octenyl-alanine olefin amino acid connected by an all-carbon crosslinker comprising one double bond
  misc_feature (4)..(11): Crosslink between residues
  MOD_RES (10)..(10): Cyclobutyl-Ala
  MOD_RES (11)..(11): Alpha-Me S5-pentenyl-alanine olefin amino acid connected by an all-carbon crosslinker comprising one double bond
  MOD_RES (17)..(17): D-amino acid
  C-term NH2
LTFAEYWAQAAAAAAAA

SEQ ID NO: 1473 - protein, 16 aa, Artificial Sequence
  Description of Artificial Sequence: Synthetic peptide
  N-term Ac
  MOD_RES (3)..(3): Alpha-Me R8-octenyl-alanine olefin amino acid connected by an all-carbon crosslinker comprising one double bond
  misc_feature (3)..(10): Crosslink between residues
  MOD_RES (10)..(10): Alpha-Me S5-pentenyl-alanine olefin amino acid connected by an all-carbon crosslinker comprising one double bond
  MOD_RES (16)..(16): D-amino acid
  C-term NH2
TFAEYWAQLAAAAAAA

SEQ ID NO: 1474 - protein, 15 aa, Artificial Sequence
  Description of Artificial Sequence: Synthetic peptide
  N-term Ac
  MOD_RES (2)..(2): Alpha-Me R8-octenyl-alanine olefin amino acid connected by an all-carbon crosslinker comprising one double bond
  misc_feature (2)..(9): Crosslink between residues
  MOD_RES (9)..(9): Alpha-Me S5-pentenyl-alanine olefin amino acid connected by an all-carbon crosslinker comprising one double bond
  MOD_RES (15)..(15): D-amino acid
  C-term NH2
FAEYWAQLAAAAAAA

SEQ ID NO: 1475 - protein, 17 aa, Artificial Sequence
  Description of Artificial Sequence: Synthetic peptide
  N-term Ac
  MOD_RES (4)..(4): Alpha-Me R8-octenyl-alanine olefin amino acid connected by an all-carbon crosslinker comprising one double bond
  misc_feature (4)..(11): Crosslink between residues
  MOD_RES (11)..(11): Alpha-Me S5-pentenyl-alanine olefin amino acid connected by an all-carbon crosslinker comprising one double bond
  MOD_RES (17)..(17): D-amino acid
  C-term NH2
LVFAEYWAQLAAAAAAA

SEQ ID NO: 1476 - protein, 17 aa, Artificial Sequence
  Description of Artificial Sequence: Synthetic peptide
  N-term Ac
  MOD_RES (4)..(4): Alpha-Me R8-octenyl-alanine olefin amino acid connected by an all-carbon crosslinker comprising one double bond
  misc_feature (4)..(11): Crosslink between residues
  MOD_RES (11)..(11): Alpha-Me S5-pentenyl-alanine olefin amino acid connected by an all-carbon crosslinker comprising one double bond
  MOD_RES (17)..(17): D-amino acid
  C-term NH2
AAFAEYWAQLAAAAAAA

SEQ ID NO: 1477 - protein, 16 aa, Artificial Sequence
  Description of Artificial Sequence: Synthetic peptide
  N-term Ac
  MOD_RES (4)..(4): Alpha-Me R8-octenyl-alanine olefin amino acid connected by an all-carbon crosslinker comprising one double bond
  misc_feature (4)..(11): Crosslink between residues
  MOD_RES (11)..(11): Alpha-Me S5-pentenyl-alanine olefin amino acid connected by an all-carbon crosslinker comprising one double bond
  MOD_RES (16)..(16): D-amino acid
  C-term NH2
LTFAEYWAQLAAAAAA

SEQ ID NO: 1478 - protein, 15 aa, Artificial Sequence
  Description of Artificial Sequence: Synthetic peptide
  N-term Ac
  MOD_RES (4)..(4): Alpha-Me R8-octenyl-alanine olefin amino acid connected by an all-carbon crosslinker comprising one double bond
  misc_feature (4)..(11): Crosslink between residues
  MOD_RES (11)..(11): Alpha-Me S5-pentenyl-alanine olefin amino acid connected by an all-carbon crosslinker comprising one double bond
  MOD_RES (15)..(15): D-amino acid
  C-term NH2
LTFAEYWAQLAAAAA

SEQ ID NO: 1479 - protein, 14 aa, Artificial Sequence
  Description of Artificial Sequence: Synthetic peptide
  N-term Ac
  MOD_RES (4)..(4): Alpha-Me R8-octenyl-alanine olefin amino acid connected by an all-carbon crosslinker comprising one double bond
  misc_feature (4)..(11): Crosslink between residues
  MOD_RES (11)..(11): Alpha-Me S5-pentenyl-alanine olefin amino acid connected by an all-carbon crosslinker comprising one double bond
  MOD_RES (14)..(14): D-amino acid
  C-term NH2
LTFAEYWAQLAAAA

SEQ ID NO: 1480 - protein, 13 aa, Artificial Sequence
  Description of Artificial Sequence: Synthetic peptide
  N-term Ac
  MOD_RES (4)..(4): Alpha-Me R8-octenyl-alanine olefin amino acid connected by an all-carbon crosslinker comprising one double bond
  misc_feature (4)..(11): Crosslink between residues
  MOD_RES (11)..(11): Alpha-Me S5-pentenyl-alanine olefin amino acid connected by an all-carbon crosslinker comprising one double bond
  MOD_RES (13)..(13): D-amino acid
  C-term NH2
LTFAEYWAQLAAA

SEQ ID NO: 1481 - protein, 12 aa, Artificial Sequence
  Description of Artificial Sequence: Synthetic peptide
  N-term Ac
  MOD_RES (4)..(4): Alpha-Me R8-octenyl-alanine olefin amino acid connected by an all-carbon crosslinker comprising one double bond
  misc_feature (4)..(11): Crosslink between residues
  MOD_RES (11)..(11): Alpha-Me S5-pentenyl-alanine olefin amino acid connected by an all-carbon crosslinker comprising one double bond
  MOD_RES (12)..(12): D-amino acid
  C-term NH2
LTFAEYWAQLAA

SEQ ID NO: 1482 - protein, 14 aa, Artificial Sequence
  Description of Artificial Sequence: Synthetic peptide
  N-term Ac
  MOD_RES (4)..(4): Alpha-Me R8-octenyl-alanine olefin amino acid connected by an all-carbon crosslinker comprising one double bond
  misc_feature (4)..(11): Crosslink between residues
  MOD_RES (10)..(10): Cyclobutyl-Ala
  MOD_RES (11)..(11): Alpha-Me S5-pentenyl-alanine olefin amino acid connected by an all-carbon crosslinker comprising one double bond
  C-term NH2
LTFAEYWAQAASAA

SEQ ID NO: 1483 - protein, 14 aa, Artificial Sequence
  Description of Artificial Sequence: Synthetic peptide
  N-term Ac
  MOD_RES (4)..(4): Alpha-Me R8-octenyl-alanine olefin amino acid connected by an all-carbon crosslinker comprising one double bond
  misc_feature (4)..(11): Crosslink between residues
  MOD_RES (10)..(10): hLeu
  MOD_RES (11)..(11): Alpha-Me S5-pentenyl-alanine olefin amino acid connected by an all-carbon crosslinker comprising one double bond
  C-term NH2
LTFAAYWAQLASAA

SEQ ID NO: 1484 - protein, 14 aa, Artificial Sequence
  Description of Artificial Sequence: Synthetic peptide
  N-term Ac
  MOD_RES (4)..(4): Alpha-Me R8-octenyl-alanine olefin amino acid connected by an all-carbon crosslinker comprising one double bond
  misc_feature (4)..(11): Crosslink between residues
  MOD_RES (10)..(10): hLeu
  MOD_RES (11)..(11): Alpha-Me S5-pentenyl-alanine olefin amino acid connected by an all-carbon crosslinker comprising one double bond
  C-term NH2
LTFAAYWAQLASAA

SEQ ID NO: 1485 - protein, 14 aa, Artificial Sequence
  Description of Artificial Sequence: Synthetic peptide
  N-term Ac
  MOD_RES (4)..(4): Alpha-Me R8-octenyl-alanine olefin amino acid connected by an all-carbon crosslinker comprising one double bond
  misc_feature (4)..(11): Crosslink between residues
  MOD_RES (7)..(7): 6cl-Trp
  MOD_RES (11)..(11): Alpha-Me S5-pentenyl-alanine olefin amino acid connected by an all-carbon crosslinker comprising one double bond
  C-term NH2
LTFAAYWAQLASAA

SEQ ID NO: 1486 - protein, 15 aa, Artificial Sequence
  Description of Artificial Sequence: Synthetic peptide
  N-term Ac
  MOD_RES (4)..(4): Alpha-Me R8-octenyl-alanine olefin amino acid connected by an all-carbon crosslinker comprising one double bond
  misc_feature (4)..(11): Crosslink between residues
  MOD_RES (7)..(7): Alpha-Me-Trp
  MOD_RES (11)..(11): Alpha-Me S5-pentenyl-alanine olefin amino acid connected by an all-carbon crosslinker comprising one double bond
  MOD_RES (14)..(14): Norleucine
  C-term NH2
LTFAAYWAQLAAALA

SEQ ID NO: 1487 - protein, 17 aa, Artificial Sequence
  Description of Artificial Sequence: Synthetic peptide
  N-term Ac
  MOD_RES (4)..(4): Alpha-Me R8-octenyl-alanine olefin amino acid connected by an all-carbon crosslinker comprising one double bond
  misc_feature (4)..(11): Crosslink between residues
  MOD_RES (11)..(11): Alpha-Me S5-pentenyl-alanine olefin amino acid connected by an all-carbon crosslinker comprising one double bond
  MOD_RES (17)..(17): D-amino acid
  C-term NH2
LTFAEYWAQLAAAAAAA

SEQ ID NO: 1488 - protein, 17 aa, Artificial Sequence
  Description of Artificial Sequence: Synthetic peptide
  N-term Ac
  MOD_RES (4)..(4): Alpha-Me R8-octenyl-alanine olefin amino acid connected by an all-carbon crosslinker comprising no double bonds
  misc_feature (4)..(11): Crosslink between residues
  MOD_RES (11)..(11): Alpha-Me S5-pentenyl-alanine olefin amino acid connected by an all-carbon crosslinker comprising no double bonds
  MOD_RES (17)..(17): D-amino acid
  C-term NH2
LTFAEYWAQLAAAAAAA

SEQ ID NO: 1489 - protein, 17 aa, Artificial Sequence
  Description of Artificial Sequence: Synthetic peptide
  N-term Ac
  MOD_RES (4)..(4): Alpha-Me R8-octenyl-alanine olefin amino acid connected by an all-carbon crosslinker comprising one double bond
  misc_feature (4)..(11): Crosslink between residues
  MOD_RES (10)..(10): Cyclobutyl-Ala
  MOD_RES (11)..(11): Alpha-Me S5-pentenyl-alanine olefin amino acid connected by an all-carbon crosslinker comprising one double bond
  MOD_RES (17)..(17): D-amino acid
  C-term NH2
LTFAEYWSQAAAAAAAA

SEQ ID NO: 1490 - protein, 15 aa, Artificial Sequence
  Description of Artificial Sequence: Synthetic peptide
  N-term Ac
  MOD_RES (4)..(4): Alpha-Me R8-octenyl-alanine olefin amino acid connected by an all-carbon crosslinker comprising one double bond
  misc_feature (4)..(11): Crosslink between residues
  MOD_RES (11)..(11): Alpha-Me S5-pentenyl-alanine olefin amino acid connected by an all-carbon crosslinker comprising one double bond
  MOD_RES (15)..(15): D-amino acid
  C-term NH2
LTFAAYWAQLAAAIA

SEQ ID NO: 1491 - protein, 15 aa, Artificial Sequence
  Description of Artificial Sequence: Synthetic peptide
  N-term Ac
  MOD_RES (4)..(4): Alpha-Me R8-octenyl-alanine olefin amino acid connected by an all-carbon crosslinker comprising one double bond
  misc_feature (4)..(11): Crosslink between residues
  MOD_RES (11)..(11): Alpha-Me S5-pentenyl-alanine olefin amino acid connected by an all-carbon crosslinker comprising one double bond
  MOD_RES (14)..(14): Norleucine
  C-term NH2
LTFAAYWAQLAAALA

SEQ ID NO: 1492 - protein, 14 aa, Artificial Sequence
  Description of Artificial Sequence: Synthetic peptide
  N-term Ac
  MOD_RES (4)..(4): Alpha-Me R8-octenyl-alanine olefin amino acid connected by an all-carbon crosslinker comprising one double bond
  misc_feature (4)..(11): Crosslink between residues
  MOD_RES (11)..(11): Alpha-Me S5-pentenyl-alanine olefin amino acid connected by an all-carbon crosslinker comprising one double bond
  C-term NH2
LTFAAYWAQLASAF

SEQ ID NO: 1493 - protein, 14 aa, Artificial Sequence
  Description of Artificial Sequence: Synthetic peptide
  N-term Ac
  MOD_RES (3)..(3): 3,4-difluoro Phe
  MOD_RES (4)..(4): Alpha-Me R8-octenyl-alanine olefin amino acid connected by an all-carbon crosslinker comprising one double bond
  misc_feature (4)..(11): Crosslink between residues
  MOD_RES (10)..(10): hLeu
  MOD_RES (11)..(11): Alpha-Me S5-pentenyl-alanine olefin amino acid connected by an all-carbon crosslinker comprising one double bond
  C-term NH2
LTFAEYWAQLASAA

SEQ ID NO: 1494 - protein, 17 aa, Artificial Sequence
  Description of Artificial Sequence: Synthetic peptide
  N-term Ac
  MOD_RES (4)..(4): Alpha-Me R8-octenyl-alanine olefin amino acid connected by an all-carbon crosslinker comprising one double bond
  misc_feature (4)..(11): Crosslink between residues
  MOD_RES (11)..(11): Alpha-Me S5-pentenyl-alanine olefin amino acid connected by an all-carbon crosslinker comprising one double bond
  MOD_RES (17)..(17): D-amino acid
  C-term NH2
LTFAAYWAQLAAAAAAA

SEQ ID NO: 1495 - protein, 15 aa, Artificial Sequence
  Description of Artificial Sequence: Synthetic peptide
  N-term Ac
  MOD_RES (4)..(4): Alpha-Me R8-octenyl-alanine olefin amino acid connected by an all-carbon crosslinker comprising one double bond
  misc_feature (4)..(11): Crosslink between residues
  MOD_RES (6)..(6): 4-carboxy Phe
  MOD_RES (10)..(10): Cyclobutyl-Ala
  MOD_RES (11)..(11): Alpha-Me S5-pentenyl-alanine olefin amino acid connected by an all-carbon crosslinker comprising one double bond
  MOD_RES (15)..(15): D-amino acid
  C-term NH2
LTFAEFWAQAAAAIA

SEQ ID NO: 1496 - protein, 17 aa, Artificial Sequence
  Description of Artificial Sequence: Synthetic peptide
  N-term Dmaac
  MOD_RES (4)..(4): Alpha-Me R8-octenyl-alanine olefin amino acid connected by an all-carbon crosslinker comprising one double bond
  misc_feature (4)..(11): Crosslink between residues
  MOD_RES (11)..(11): Alpha-Me S5-pentenyl-alanine olefin amino acid connected by an all-carbon crosslinker comprising one double bond
  MOD_RES (17)..(17): D-amino acid
  C-term NH2
LTFAAYWAQLAAAAAAA

SEQ ID NO: 1497 - protein, 17 aa, Artificial Sequence
  Description of Artificial Sequence: Synthetic peptide
  N-term Ac
  MOD_RES (4)..(4): Alpha-Me R8-octenyl-alanine olefin amino acid connected by an all-carbon crosslinker comprising one double bond
  misc_feature (4)..(11): Crosslink between residues
  MOD_RES (6)..(6): 4-carboxy Phe
  MOD_RES (10)..(10): Cyclobutyl-Ala
  MOD_RES (11)..(11): Alpha-Me S5-pentenyl-alanine olefin amino acid connected by an all-carbon crosslinker comprising one double bond
  MOD_RES (17)..(17): D-amino acid
  C-term NH2
LTFAEFWAQAAAAAAAA

SEQ ID NO: 1498 - protein, 17 aa, Artificial Sequence
  Description of Artificial Sequence: Synthetic peptide
  N-term Ac
  MOD_RES (4)..(4): Alpha-Me R8-octenyl-alanine olefin amino acid connected by an all-carbon crosslinker comprising one double bond
  misc_feature (4)..(11): Crosslink between residues
  MOD_RES (7)..(7): 6cl-Trp
  MOD_RES (11)..(11): Alpha-Me S5-pentenyl-alanine olefin amino acid connected by an all-carbon crosslinker comprising one double bond
  MOD_RES (17)..(17): D-amino acid
  C-term NH2
LTFAEYWAQLAAAAAAA

SEQ ID NO: 1499 - protein, 20 aa, Artificial Sequence
  Description of Artificial Sequence: Synthetic peptide
  N-term Ac
  MOD_RES (7)..(7): Alpha-Me R8-octenyl-alanine olefin amino acid connected by an all-carbon crosslinker comprising one double bond
  misc_feature (7)..(14): Crosslink between residues
  MOD_RES (14)..(14): Alpha-Me S5-pentenyl-alanine olefin amino acid connected by an all-carbon crosslinker comprising one double bond
  MOD_RES (20)..(20): D-amino acid
  C-term NH2
AAALTFAEYWAQLAAAAAAA

SEQ ID NO: 1500 - protein, 17 aa, Artificial Sequence
  Description of Artificial Sequence: Synthetic peptide
  N-term Ac
  MOD_RES (3)..(3): 3,4-difluoro Phe
  MOD_RES (4)..(4): Alpha-Me R8-octenyl-alanine olefin amino acid connected by an all-carbon crosslinker comprising one double bond
  misc_feature (4)..(11): Crosslink between residues
  MOD_RES (11)..(11): Alpha-Me S5-pentenyl-alanine olefin amino acid connected by an all-carbon crosslinker comprising one double bond
  MOD_RES (17)..(17): D-amino acid
  C-term NH2
LTFAEYWAQLAAAAAAA

SEQ ID NO: 1501 - protein, 15 aa, Artificial Sequence
  Description of Artificial Sequence: Synthetic peptide
  N-term 5-FAM
  MOD_RES (1)..(1): Beta-Ala
  MOD_RES (5)..(5): Alpha-Me R8-octenyl-alanine olefin amino acid connected by an all-carbon crosslinker comprising one double bond
  misc_feature (5)..(12): Crosslink between residues
  MOD_RES (11)..(11): Cyclobutyl-Ala
  MOD_RES (12)..(12): Alpha-Me S5-pentenyl-alanine olefin amino acid connected by an all-carbon crosslinker comprising one double bond
  C-term NH2
ALTFAEYWAQAASAA

SEQ ID NO: 1502 - protein, 17 aa, Artificial Sequence
  Description of Artificial Sequence: Synthetic peptide
  N-term Ac
  MOD_RES (4)..(4): Alpha-Me R8-octenyl-alanine olefin amino acid connected by an all-carbon crosslinker comprising one double bond
  misc_feature (4)..(11): Crosslink between residues
  MOD_RES (11)..(11): Alpha-Me S5-pentenyl-alanine olefin amino acid connected by an all-carbon crosslinker comprising one double bond
  MOD_RES (13)..(13): 2-aminoisobutyric acid
  MOD_RES (17)..(17): D-amino acid
  C-term NH2
LTFAEYWAQLAAXAAAA

SEQ ID NO: 1503 - protein, 17 aa, Artificial Sequence
  Description of Artificial Sequence: Synthetic peptide
  N-term Ac
  MOD_RES (4)..(4): Alpha-Me R8-octenyl-alanine olefin amino acid connected by an all-carbon crosslinker comprising one double bond
  misc_feature (4)..(11): Crosslink between residues
  MOD_RES (11)..(11): Alpha-Me S5-pentenyl-alanine olefin amino acid connected by an all-carbon crosslinker comprising one double bond
  MOD_RES (15)..(15): 2-aminoisobutyric acid
  MOD_RES (17)..(17): D-amino acid
  C-term NH2
LTFAEYWAQLAAAAXAA

SEQ ID NO: 1504 - protein, 17 aa, Artificial Sequence
  Description of Artificial Sequence: Synthetic peptide
  N-term Ac
  MOD_RES (4)..(4): Alpha-Me R8-octenyl-alanine olefin amino acid connected by an all-carbon crosslinker comprising one double bond
  misc_feature (4)..(11): Crosslink between residues
  MOD_RES (11)..(11): Alpha-Me S5-pentenyl-alanine olefin amino acid connected by an all-carbon crosslinker comprising one double bond
  MOD_RES (16)..(16): 2-aminoisobutyric acid
  MOD_RES (17)..(17): D-amino acid
  C-term NH2
LTFAEYWAQLAAAAAXA

SEQ ID NO: 1505 - protein, 17 aa, Artificial Sequence
  Description of Artificial Sequence: Synthetic peptide
  N-term Ac
  MOD_RES (4)..(4): Alpha-Me R8-octenyl-alanine olefin amino acid connected by an all-carbon crosslinker comprising one double bond
  misc_feature (4)..(11): Crosslink between residues
  MOD_RES (11)..(11): Alpha-Me S5-pentenyl-alanine olefin amino acid connected by an all-carbon crosslinker comprising one double bond
  MOD_RES (17)..(17): 2-aminoisobutyric acid
  C-term NH2
LTFAEYWAQLAAAAAAX

SEQ ID NO: 1506 - protein, 17 aa, Artificial Sequence
  Description of Artificial Sequence: Synthetic peptide
  N-term Ac
  MOD_RES (4)..(4): Alpha-Me R8-octenyl-alanine olefin amino acid connected by an all-carbon crosslinker comprising one double bond
  misc_feature (4)..(11): Crosslink between residues
  MOD_RES (11)..(11): Alpha-Me S5-pentenyl-alanine olefin amino acid connected by an all-carbon crosslinker comprising one double bond
  MOD_RES (15)..(15): D-amino acid
  MOD_RES (17)..(17): D-amino acid
  C-term NH2
LTFAEYWAQLAAAAAAA

SEQ ID NO: 1507 - protein, 17 aa, Artificial Sequence
  Description of Artificial Sequence: Synthetic peptide
  N-term Ac
  MOD_RES (4)..(4): Alpha-Me R8-octenyl-alanine olefin amino acid connected by an all-carbon crosslinker comprising one double bond
  misc_feature (4)..(11): Crosslink between residues
  MOD_RES (11)..(11): Alpha-Me S5-pentenyl-alanine olefin amino acid connected by an all-carbon crosslinker comprising one double bond
  C-term NH2
LTFAEYWAQLAAAAAAA

SEQ ID NO: 1508 - protein, 17 aa, Artificial Sequence
  Description of Artificial Sequence: Synthetic peptide
  N-term Ac
  MOD_RES (4)..(4): Alpha-Me R8-octenyl-alanine olefin amino acid connected by an all-carbon crosslinker comprising one double bond
  misc_feature (4)..(11): Crosslink between residues
  MOD_RES (11)..(11): Alpha-Me S5-pentenyl-alanine olefin amino acid connected by an all-carbon crosslinker comprising one double bond
  MOD_RES (17)..(17): Sarcosine
  C-term NH2
LTFAEYWAQLAAAAAAX

SEQ ID NO: 1509 - protein, 17 aa, Artificial Sequence
  Description of Artificial Sequence: Synthetic peptide
  N-term Ac
  MOD_RES (4)..(4): Alpha-Me R6-hexynyl-alanine alkynyl amino acids, crosslinke via a dialkyne bond with a second alkynyl amino acid
  misc_feature (4)..(11): Crosslink between residues
  MOD_RES (11)..(11): Alpha-Me S5-pentynyl-alanine alkynyl amino acids, wherein the alkyne forms one half of a dialkyne bond with a second alkynyl amino acid
  MOD_RES (17)..(17): D-amino acid
  C-term NH2
LTFAEYWAQLAAAAAAA

SEQ ID NO: 1510 - protein, 17 aa, Artificial Sequence
  Description of Artificial Sequence: Synthetic peptide
  N-term Ac
  MOD_RES (4)..(4): Alpha-Me R6-hexynyl-alanine alkynyl amino acids, crosslinke via a dialkyne bond with a second alkynyl amino acid
  misc_feature (4)..(11): Crosslink between residues
  MOD_RES (11)..(11): Alpha-Me S5-pentynyl-alanine alkynyl amino acids, wherein the alkyne forms one half of a dialkyne bond with a second alkynyl amino acid
  MOD_RES (17)..(17): D-amino acid
  C-term NH2
LTFAAYWAQLAAAAAAA

SEQ ID NO: 1511 - protein, 16 aa, Artificial Sequence
  Description of Artificial Sequence: Synthetic peptide
  N-term Ac
  MOD_RES (4)..(4): Any amino acid available for crosslinking
  misc_feature (4)..(10): Crosslink between residues
  MOD_RES (10)..(10): Any amino acid available for crosslinking
  C-term NH2
  see specification as filed for detailed description of substitutions and preferred embodiments
LTFXEYWAQXAAAAAA

SEQ ID NO: 1512 - protein, 16 aa, Artificial Sequence
  Description of Artificial Sequence: Synthetic peptide
  MOD_RES (2)..(2): Alpha-Me R5-pentenyl-alanine olefin amino acid connected by an all-carbon crosslinker comprising one double bond
  misc_feature (2)..(9): Crosslink between residues
  MOD_RES (9)..(9): Alpha-Me S8-octenyl-alanine olefin amino acid connected by an all-carbon crosslinker comprising one double bond
LAQETFSDAWKLLPEN

SEQ ID NO: 1513 - protein, 16 aa, Artificial Sequence
  Description of Artificial Sequence: Synthetic peptide
  MOD_RES (4)..(4): Alpha-Me R5-pentenyl-alanine olefin amino acid connected by an all-carbon crosslinker comprising one double bond
  misc_feature (4)..(11): Crosslink between residues
  MOD_RES (11)..(11): Alpha-Me S8-octenyl-alanine olefin amino acid connected by an all-carbon crosslinker comprising one double bond
LSQATFSDLWALLPEN

SEQ ID NO: 1514 - protein, 16 aa, Artificial Sequence
  Description of Artificial Sequence: Synthetic peptide
  MOD_RES (5)..(5): Alpha-Me R5-pentenyl-alanine olefin amino acid connected by an all-carbon crosslinker comprising one double bond
  misc_feature (5)..(12): Crosslink between residues
  MOD_RES (12)..(12): Alpha-Me S8-octenyl-alanine olefin amino acid connected by an all-carbon crosslinker comprising one double bond
LSQEAFSDLWKALPEN

SEQ ID NO: 1515 - protein, 16 aa, Artificial Sequence
  Description of Artificial Sequence: Synthetic peptide
  MOD_RES (6)..(6): Alpha-Me R5-pentenyl-alanine olefin amino acid connected by an all-carbon crosslinker comprising one double bond
  misc_feature (6)..(13): Crosslink between residues
  MOD_RES (13)..(13): Alpha-Me S8-octenyl-alanine olefin amino acid connected by an all-carbon crosslinker comprising one double bond
LSQETASDLWKLAPEN

SEQ ID NO: 1516 - protein, 16 aa, Artificial Sequence
  Description of Artificial Sequence: Synthetic peptide
  MOD_RES (7)..(7): Alpha-Me R5-pentenyl-alanine olefin amino acid connected by an all-carbon crosslinker comprising one double bond
  misc_feature (7)..(14): Crosslink between residues
  MOD_RES (14)..(14): Alpha-Me S8-octenyl-alanine olefin amino acid connected by an all-carbon crosslinker comprising one double bond
LSQETFADLWKLLAEN

SEQ ID NO: 1517 - protein, 16 aa, Artificial Sequence
  Description of Artificial Sequence: Synthetic peptide
  MOD_RES (2)..(2): Any amino acid
  MOD_RES (8)..(8): Alpha-Me R5-pentenyl-alanine olefin amino acid connected by an all-carbon crosslinker comprising one double bond
  misc_feature (8)..(15): Crosslink between residues
  MOD_RES (15)..(15): Alpha-Me S8-octenyl-alanine olefin amino acid connected by an all-carbon crosslinker comprising one double bond
LXQETFSALWKLLPAN

SEQ ID NO: 1518 - protein, 16 aa, Artificial Sequence
  Description of Artificial Sequence: Synthetic peptide
  MOD_RES (9)..(9): Alpha-Me R5-pentenyl-alanine olefin amino acid connected by an all-carbon crosslinker comprising one double bond
  misc_feature (9)..(16): Crosslink between residues
  MOD_RES (16)..(16): Alpha-Me S8-octenyl-alanine olefin amino acid connected by an all-carbon crosslinker comprising one double bond
LSQETFSDAWKLLPEA

SEQ ID NO: 1519 - protein, 16 aa, Artificial Sequence
  Description of Artificial Sequence: Synthetic peptide
  MOD_RES (7)..(7): Alpha-Me R5-pentenyl-alanine olefin amino acid connected by an all-carbon crosslinker comprising one double bond
  misc_feature (7)..(14): Crosslink between residues
  MOD_RES (14)..(14): Alpha-Me S8-octenyl-alanine olefin amino acid connected by an all-carbon crosslinker comprising one double bond
LSQQTFADLWKLLAEN

SEQ ID NO: 1520 - protein, 16 aa, Artificial Sequence
  Description of Artificial Sequence: Synthetic peptide
  MOD_RES (7)..(7): Alpha-Me R5-pentenyl-alanine olefin amino acid connected by an all-carbon crosslinker comprising one double bond
  misc_feature (7)..(14): Crosslink between residues
  MOD_RES (14)..(14): Alpha-Me S8-octenyl-alanine olefin amino acid connected by an all-carbon crosslinker comprising one double bond
LSQETFADLWKLLAQN

SEQ ID NO: 1521 - protein, 16 aa, Artificial Sequence
  Description of Artificial Sequence: Synthetic peptide
  MOD_RES (7)..(7): Alpha-Me R5-pentenyl-alanine olefin amino acid connected by an all-carbon crosslinker comprising one double bond
  misc_feature (7)..(14): Crosslink between residues
  MOD_RES (14)..(14): Alpha-Me S8-octenyl-alanine olefin amino acid connected by an all-carbon crosslinker comprising one double bond
LSQQTFADLWKLLAQN

SEQ ID NO: 1522 - protein, 16 aa, Artificial Sequence
  Description of Artificial Sequence: Synthetic peptide
  MOD_RES (7)..(7): Alpha-Me R5-pentenyl-alanine olefin amino acid connected by an all-carbon crosslinker comprising one double bond
  misc_feature (7)..(14): Crosslink between residues
  MOD_RES (14)..(14): Alpha-Me S8-octenyl-alanine olefin amino acid connected by an all-carbon crosslinker comprising one double bond
LSQETFANLWKLLAQN

SEQ ID NO: 1523 - protein, 16 aa, Artificial Sequence
  Description of Artificial Sequence: Synthetic peptide
  MOD_RES (7)..(7): Alpha-Me R5-pentenyl-alanine olefin amino acid connected by an all-carbon crosslinker comprising one double bond
  misc_feature (7)..(14): Crosslink between residues
  MOD_RES (14)..(14): Alpha-Me S8-octenyl-alanine olefin amino acid connected by an all-carbon crosslinker comprising one double bond
LSQQTFANLWKLLAQN

SEQ ID NO: 1524 - protein, 16 aa, Artificial Sequence
  Description of Artificial Sequence: Synthetic peptide
  MOD_RES (7)..(7): Alpha-Me R5-pentenyl-alanine olefin amino acid connected by an all-carbon crosslinker comprising one double bond
  misc_feature (7)..(14): Crosslink between residues
  MOD_RES (14)..(14): Alpha-Me S8-octenyl-alanine olefin amino acid connected by an all-carbon crosslinker comprising one double bond
LSQQTFANLWRLLAQN

SEQ ID NO: 1525 - protein, 16 aa, Artificial Sequence
  Description of Artificial Sequence: Synthetic peptide
  MOD_RES (7)..(7): Alpha-Me R5-pentenyl-alanine olefin amino acid connected by an all-carbon crosslinker comprising one double bond
  misc_feature (7)..(14): Crosslink between residues
  MOD_RES (14)..(14): Alpha-Me S8-octenyl-alanine olefin amino acid connected by an all-carbon crosslinker comprising one double bond
QSQQTFANLWKLLAQN

SEQ ID NO: 1526 - protein, 16 aa, Artificial Sequence
  Description of Artificial Sequence: Synthetic peptide
  MOD_RES (7)..(7): Alpha-Me R5-pentenyl-alanine olefin amino acid connected by an all-carbon crosslinker comprising one double bond
  misc_feature (7)..(14): Crosslink between residues
  MOD_RES (14)..(14): Alpha-Me S8-octenyl-alanine olefin amino acid connected by an all-carbon crosslinker comprising one double bond
QSQQTFANLWRLLAQN

SEQ ID NO: 1527 - protein, 16 aa, Artificial Sequence
  Description of Artificial Sequence: Synthetic peptide
  MOD_RES (7)..(7): Alpha-Me R5-pentenyl-alanine olefin amino acid connected by an all-carbon crosslinker comprising one double bond
  misc_feature (7)..(14): Crosslink between residues
  MOD_RES (14)..(14): Alpha-Me S8-octenyl-alanine olefin amino acid connected by an all-carbon crosslinker comprising one double bond
QSQQTAANLWRLLAQN

SEQ ID NO: 1528 - protein, 16 aa, Artificial Sequence
  Description of Artificial Sequence: Synthetic peptide
  MOD_RES (2)..(2): Alpha-Me R8-octenyl-alanine olefin amino acid connected by an all-carbon crosslinker comprising one double bond
  misc_feature (2)..(9): Crosslink between residues
  MOD_RES (9)..(9): Alpha-Me S5-pentenyl-alanine olefin amino acid connected by an all-carbon crosslinker comprising one double bond
LAQETFSDAWKLLPEN

SEQ ID NO: 1529 - protein, 16 aa, Artificial Sequence
  Description of Artificial Sequence: Synthetic peptide
  MOD_RES (4)..(4): Alpha-Me R8-octenyl-alanine olefin amino acid connected by an all-carbon crosslinker comprising one double bond
  misc_feature (4)..(11): Crosslink between residues
  MOD_RES (11)..(11): Alpha-Me S5-pentenyl-alanine olefin amino acid connected by an all-carbon crosslinker comprising one double bond
LSQATFSDLWALLPEN

SEQ ID NO: 1530 - protein, 16 aa, Artificial Sequence
  Description of Artificial Sequence: Synthetic peptide
  MOD_RES (5)..(5): Alpha-Me R8-octenyl-alanine olefin amino acid connected by an all-carbon crosslinker comprising one double bond
  misc_feature (5)..(12): Crosslink between residues
  MOD_RES (12)..(12): Alpha-Me S5-pentenyl-alanine olefin amino acid connected by an all-carbon crosslinker comprising one double bond
LSQEAFSDLWKALPEN

SEQ ID NO: 1531 - protein, 16 aa, Artificial Sequence
  Description of Artificial Sequence: Synthetic peptide
  MOD_RES (6)..(6): Alpha-Me R8-octenyl-alanine olefin amino acid connected by an all-carbon crosslinker comprising one double bond
  misc_feature (6)..(13): Crosslink between residues
  MOD_RES (13)..(13): Alpha-Me S5-pentenyl-alanine olefin amino acid connected by an all-carbon crosslinker comprising one double bond
LSQETASDLWKLAPEN

SEQ ID NO: 1532 - protein, 16 aa, Artificial Sequence
  Description of Artificial Sequence: Synthetic peptide
  MOD_RES (7)..(7): Alpha-Me R8-octenyl-alanine olefin amino acid connected by an all-carbon crosslinker comprising one double bond
  misc_feature (7)..(14): Crosslink between residues
  MOD_RES (14)..(14): Alpha-Me S5-pentenyl-alanine olefin amino acid connected by an all-carbon crosslinker comprising one double bond
LSQETFADLWKLLAEN

SEQ ID NO: 1533 - protein, 16 aa, Artificial Sequence
  Description of Artificial Sequence: Synthetic peptide
  MOD_RES (2)..(2): Any amino acid
  MOD_RES (8)..(8): Alpha-Me R8-octenyl-alanine olefin amino acid connected by an all-carbon crosslinker comprising one double bond
  misc_feature (8)..(15): Crosslink between residues
  MOD_RES (15)..(15): Alpha-Me S5-pentenyl-alanine olefin amino acid connected by an all-carbon crosslinker comprising one double bond
LXQETFSALWKLLPAN

SEQ ID NO: 1534 - protein, 16 aa, Artificial Sequence
  Description of Artificial Sequence: Synthetic peptide
  MOD_RES (9)..(9): Alpha-Me R8-octenyl-alanine olefin amino acid connected by an all-carbon crosslinker comprising one double bond
  misc_feature (9)..(16): Crosslink between residues
  MOD_RES (16)..(16): Alpha-Me S5-pentenyl-alanine olefin amino acid connected by an all-carbon crosslinker comprising one double bond
LSQETFSDAWKLLPEA

SEQ ID NO: 1535 - protein, 16 aa, Artificial Sequence
  Description of Artificial Sequence: Synthetic peptide
  MOD_RES (7)..(7): Alpha-Me R8-octenyl-alanine olefin amino acid connected by an all-carbon crosslinker comprising one double bond
  misc_feature (7)..(14): Crosslink between residues
  MOD_RES (14)..(14): Alpha-Me S5-pentenyl-alanine olefin amino acid connected by an all-carbon crosslinker comprising one double bond
LSQQTFADLWKLLAEN

SEQ ID NO: 1536 - protein, 16 aa, Artificial Sequence
  Description of Artificial Sequence: Synthetic peptide
  MOD_RES (7)..(7): Alpha-Me R8-octenyl-alanine olefin amino acid connected by an all-carbon crosslinker comprising one double bond
  misc_feature (7)..(14): Crosslink between residues
  MOD_RES (14)..(14): Alpha-Me S5-pentenyl-alanine olefin amino acid connected by an all-carbon crosslinker comprising one double bond
LSQETFADLWKLLAQN

SEQ ID NO: 1537 - protein, 16 aa, Artificial Sequence
  Description of Artificial Sequence: Synthetic peptide
  MOD_RES (7)..(7): Alpha-Me R8-octenyl-alanine olefin amino acid connected by an all-carbon crosslinker comprising one double bond
  misc_feature (7)..(14): Crosslink between residues
  MOD_RES (14)..(14): Alpha-Me S5-pentenyl-alanine olefin amino acid connected by an all-carbon crosslinker comprising one double bond
LSQQTFADLWKLLAQN

SEQ ID NO: 1538 - protein, 16 aa, Artificial Sequence
  Description of Artificial Sequence: Synthetic peptide
  MOD_RES (7)..(7): Alpha-Me R8-octenyl-alanine olefin amino acid connected by an all-carbon crosslinker comprising one double bond
  misc_feature (7)..(14): Crosslink between residues
  MOD_RES (14)..(14): Alpha-Me S5-pentenyl-alanine olefin amino acid connected by an all-carbon crosslinker comprising one double bond
LSQETFANLWKLLAQN

SEQ ID NO: 1539 - protein, 16 aa, Artificial Sequence
  Description of Artificial Sequence: Synthetic peptide
  MOD_RES (7)..(7): Alpha-Me R8-octenyl-alanine olefin amino acid connected by an all-carbon crosslinker comprising one double bond
  misc_feature (7)..(14): Crosslink between residues
  MOD_RES (14)..(14): Alpha-Me S5-pentenyl-alanine olefin amino acid connected by an all-carbon crosslinker comprising one double bond
LSQQTFANLWKLLAQN

SEQ ID NO: 1540 - protein, 16 aa, Artificial Sequence
  Description of Artificial Sequence: Synthetic peptide
  MOD_RES (7)..(7): Alpha-Me R8-octenyl-alanine olefin amino acid connected by an all-carbon crosslinker comprising one double bond
  misc_feature (7)..(14): Crosslink between residues
  MOD_RES (14)..(14): Alpha-Me S5-pentenyl-alanine olefin amino acid connected by an all-carbon crosslinker comprising one double bond
LSQQTFANLWRLLAQN

SEQ ID NO: 1541 - protein, 16 aa, Artificial Sequence
  Description of Artificial Sequence: Synthetic peptide
  MOD_RES (7)..(7): Alpha-Me R8-octenyl-alanine olefin amino acid connected by an all-carbon crosslinker comprising one double bond
  misc_feature (7)..(14): Crosslink between residues
  MOD_RES (14)..(14): Alpha-Me S5-pentenyl-alanine olefin amino acid connected by an all-carbon crosslinker comprising one double bond
QSQQTFANLWKLLAQN

SEQ ID NO: 1542 - protein, 16 aa, Artificial Sequence
  Description of Artificial Sequence: Synthetic peptide
  MOD_RES (7)..(7): Alpha-Me R8-octenyl-alanine olefin amino acid connected by an all-carbon crosslinker comprising one double bond
  misc_feature (7)..(14): Crosslink between residues
  MOD_RES (14)..(14): Alpha-Me S5-pentenyl-alanine olefin amino acid connected by an all-carbon crosslinker comprising one double bond
QSQQTFANLWRLLAQN

SEQ ID NO: 1543 - protein, 16 aa, Artificial Sequence
  Description of Artificial Sequence: Synthetic peptide
  MOD_RES (7)..(7): Alpha-Me R8-octenyl-alanine olefin amino acid connected by an all-carbon crosslinker comprising one double bond
  misc_feature (7)..(14): Crosslink between residues
  MOD_RES (14)..(14): Alpha-Me S5-pentenyl-alanine olefin amino acid connected by an all-carbon crosslinker comprising one double bond
QSQQTAANLWRLLAQN

SEQ ID NO: 1544 - protein, 16 aa, Artificial Sequence
  Description of Artificial Sequence: Synthetic peptide
  MOD_RES (7)..(7): Alpha-Me R8-octenyl-alanine olefin amino acid connected by an all-carbon crosslinker comprising one double bond
  misc_feature (7)..(14): Crosslink between residues
  MOD_RES (14)..(14): Alpha-Me S5-pentenyl-alanine olefin amino acid connected by an all-carbon crosslinker comprising one double bond
QSQQTFANLWRKKAQN

SEQ ID NO: 1545 - protein, 14 aa, Artificial Sequence
  Description of Artificial Sequence: Synthetic peptide
  MOD_RES (5)..(5): Alpha-Me R8-octenyl-alanine olefin amino acid connected by an all-carbon crosslinker comprising one double bond
  misc_feature (5)..(12): Crosslink between residues
  MOD_RES (12)..(12): Alpha-Me S5-pentenyl-alanine olefin amino acid connected by an all-carbon crosslinker comprising one double bond
QQTFADLWRLLAEN

SEQ ID NO: 1546 - protein, 12 aa, Artificial Sequence
  Description of Artificial Sequence: Synthetic peptide
  MOD_RES (5)..(5): Alpha-Me R8-octenyl-alanine olefin amino acid connected by an all-carbon crosslinker comprising one double bond
  misc_feature (5)..(12): Crosslink between residues
  MOD_RES (12)..(12): Alpha-Me S5-pentenyl-alanine olefin amino acid connected by an all-carbon crosslinker comprising one double bond
QQTFADLWRLLA

SEQ ID NO: 1547 - protein, 13 aa, Artificial Sequence
  Description of Artificial Sequence: Synthetic peptide
  MOD_RES (7)..(7): Alpha-Me S5-pentenyl-alanine olefin amino acid connected by an all-carbon crosslinker comprising one double bond
  misc_feature (7)..(11): Crosslink between residues
  MOD_RES (11)..(11): Alpha-Me S5-pentenyl-alanine olefin amino acid connected by an all-carbon crosslinker comprising one double bond
LSQQTFADLWALL

SEQ ID NO: 1548 - protein, 11 aa, Artificial Sequence
  Description of Artificial Sequence: Synthetic peptide
  MOD_RES (5)..(5): Alpha-Me S5-pentenyl-alanine olefin amino acid connected by an all-carbon crosslinker comprising one double bond
  misc_feature (5)..(9): Crosslink between residues
  MOD_RES (9)..(9): Alpha-Me S5-pentenyl-alanine olefin amino acid connected by an all-carbon crosslinker comprising one double bond
QQTFADLWALL

SEQ ID NO: 1549 - protein, 14 aa, Artificial Sequence
  Description of Artificial Sequence: Synthetic peptide
  MOD_RES (5)..(5): Alpha-Me R8-octenyl-alanine olefin amino acid connected by an all-carbon crosslinker comprising one double bond
  misc_feature (5)..(12): Crosslink between residues
  MOD_RES (12)..(12): Alpha-Me S5-pentenyl-alanine olefin amino acid connected by an all-carbon crosslinker comprising one double bond
QQTAADLWRLLAEN

SEQ ID NO: 1550 - protein, 16 aa, Artificial Sequence
  Description of Artificial Sequence: Synthetic peptide
  MOD_RES (7)..(7): Alpha-Me R5-pentenyl-alanine olefin amino acid connected by an all-carbon crosslinker comprising one double bond
  misc_feature (7)..(14): Crosslink between residues
  MOD_RES (14)..(14): Alpha-Me S8-octenyl-alanine olefin amino acid connected by an all-carbon crosslinker comprising one double bond
QSQQTFANLWRLLAQN

SEQ ID NO: 1551 - protein, 16 aa, Artificial Sequence
  Description of Artificial Sequence: Synthetic peptide
  MOD_RES (7)..(7): Alpha-Me R5-pentenyl-alanine olefin amino acid connected by an all-carbon crosslinker comprising one double bond
  misc_feature (7)..(14): Crosslink between residues
  MOD_RES (14)..(14): Alpha-Me S8-octenyl-alanine olefin amino acid connected by an all-carbon crosslinker comprising one double bond
QSQQTAANLWRLLAQN

SEQ ID NO: 1552 - protein, 16 aa, Artificial Sequence
  Description of Artificial Sequence: Synthetic peptide
  MOD_RES (7)..(7): Alpha-Me R8-octenyl-alanine olefin amino acid connected by an all-carbon crosslinker comprising one double bond
  misc_feature (7)..(14): Crosslink between residues
  MOD_RES (14)..(14): Alpha-Me S5-pentenyl-alanine olefin amino acid connected by an all-carbon crosslinker comprising one double bond
QSQQTFADLWRLLAQN

SEQ ID NO: 1553 - protein, 11 aa, Artificial Sequence
  Description of Artificial Sequence: Synthetic peptide
  MOD_RES (4)..(4): Alpha-Me R8-octenyl-alanine olefin amino acid connected by an all-carbon crosslinker comprising one double bond
  misc_feature (4)..(11): Crosslink between residues
  MOD_RES (11)..(11): Alpha-Me S5-pentenyl-alanine olefin amino acid connected by an all-carbon crosslinker comprising one double bond
QTFANLWRLLA

SEQ ID NO: 1554 - protein, 16 aa, Artificial Sequence
  Description of Artificial Sequence: Synthetic peptide
  MOD_RES (7)..(7): Alpha-Me S5-pentenyl-alanine olefin amino acid connected by an all-carbon crosslinker comprising one double bond
  misc_feature (7)..(11): Crosslink between residues
  MOD_RES (11)..(11): Alpha-Me S5-pentenyl-alanine olefin amino acid connected by an all-carbon crosslinker comprising one double bond
QSQQTFANLWALLPQN

SEQ ID NO: 1555 - protein, 16 aa, Artificial Sequence
  Description of Artificial Sequence: Synthetic peptide
  MOD_RES (3)..(3): Alpha-Me S5-pentenyl-alanine olefin amino acid connected by an all-carbon crosslinker comprising one double bond
  misc_feature (3)..(7): Crosslink between residues
  MOD_RES (7)..(7): Alpha-Me S5-pentenyl-alanine olefin amino acid connected by an all-carbon crosslinker comprising one double bond
QSAQTFANLWRLLPQN

SEQ ID NO: 1556 - protein, 10 aa, Artificial Sequence
  Description of Artificial Sequence: Synthetic peptide
  MOD_RES (1)..(1): Alpha-Me S5-pentenyl-alanine olefin amino acid connected by an all-carbon crosslinker comprising one double bond
  misc_feature (1)..(5): Crosslink between residues
  MOD_RES (5)..(5): Alpha-Me S5-pentenyl-alanine olefin amino acid connected by an all-carbon crosslinker comprising one double bond
ATFSALWKLL

SEQ ID NO: 1557 - protein, 10 aa, Artificial Sequence
  Description of Artificial Sequence: Synthetic peptide
  MOD_RES (4)..(4): Alpha-Me S5-pentenyl-alanine olefin amino acid connected by an all-carbon crosslinker comprising one double bond
  misc_feature (4)..(8): Crosslink between residues
  MOD_RES (8)..(8): Alpha-Me S5-pentenyl-alanine olefin amino acid connected by an all-carbon crosslinker comprising one double bond
ETFADLWALL

SEQ ID NO: 1558 - protein, 10 aa, Artificial Sequence
  Description of Artificial Sequence: Synthetic peptide
  MOD_RES (4)..(4): Alpha-Me S5-pentenyl-alanine olefin amino acid connected by an all-carbon crosslinker comprising one double bond
  misc_feature (4)..(8): Crosslink between residues
  MOD_RES (8)..(8): Alpha-Me S5-pentenyl-alanine olefin amino acid connected by an all-carbon crosslinker comprising one double bond
QTFANLWALL

SEQ ID NO: 1559 - protein, 13 aa, Artificial Sequence
  Description of Artificial Sequence: Synthetic peptide
  MOD_RES (1)..(1): Alpha-Me S5-pentenyl-alanine olefin amino acid connected by an all-carbon crosslinker comprising one double bond
  misc_feature (1)..(5): Crosslink between residues
  MOD_RES (5)..(5): Alpha-Me S5-pentenyl-alanine olefin amino acid connected by an all-carbon crosslinker comprising one double bond
ASQEAFSNLWKLL

SEQ ID NO: 1560 - protein, 12 aa, Artificial Sequence
  Description of Artificial Sequence: Synthetic peptide
  N-term Ac
  MOD_RES (1)..(12): D-amino acid
  C-term NH2
TAWYANFEKLLR

SEQ ID NO: 1561 - protein, 12 aa, Artificial Sequence
  Description of Artificial Sequence: Synthetic peptide
  N-term Ac
  MOD_RES (1)..(6): D-amino acid
  MOD_RES (7)..(7): D-Phe-4CF3
  MOD_RES (8)..(12): D-amino acid
  C-term NH2
TAWYANFEKLLR

SEQ ID NO: 1562 - protein, 12 aa, Artificial Sequence
  Description of Artificial Sequence: Synthetic peptide
  N-term Ac
  MOD_RES (2)..(2): Alpha-Me R-azide 1,4 triazole (6 carbon) alanine olefin amino acid connected by an all-carbon crosslinker comprising one double bond
  misc_feature (2)..(9): Crosslink between residues
  MOD_RES (7)..(7): Ac3c
  MOD_RES (9)..(9): Alpha-Me alkyne 1,4 triazole (5 carbon) alanine olefin amino acid connected by an all-carbon crosslinker comprising one double bond
  C-term NH2
FAAYWEXLAAAA

SEQ ID NO: 1563 - protein, 12 aa, Artificial Sequence
  Description of Artificial Sequence: Synthetic peptide
  N-term Ac
  MOD_RES (2)..(2): Alpha-Me R-azide 1,4 triazole (6 carbon) alanine olefin amino acid connected by an all-carbon crosslinker comprising one double bond
  misc_feature (2)..(9): Crosslink between residues
  MOD_RES (7)..(7): Ac3c
  MOD_RES (9)..(9): Alpha-Me alkyne 1,4 triazole (5 carbon) alanine olefin amino acid connected by an all-carbon crosslinker comprising one double bond
  MOD_RES (11)..(11): 2-aminoisobutyric acid
  C-term NH2
FAAYWEXLAAXA

SEQ ID NO: 1564 - protein, 14 aa, Artificial Sequence
  Description of Artificial Sequence: Synthetic peptide
  N-term Ac
  MOD_RES (4)..(4): Alpha-Me R-azide 1,4 triazole (6 carbon) alanine olefin amino acid connected by an all-carbon crosslinker comprising one double bond
  misc_feature (4)..(11): Crosslink between residues
  MOD_RES (11)..(11): Alpha-Me alkyne 1,4 triazole (5 carbon) alanine olefin amino acid connected by an all-carbon crosslinker comprising one double bond
  MOD_RES (14)..(14): Norleucine
  C-term NH2
LTFAAYWAQLASAL

SEQ ID NO: 1565 - protein, 14 aa, Artificial Sequence
  Description of Artificial Sequence: Synthetic peptide
  N-term Ac
  MOD_RES (4)..(4): Alpha-Me R-azide 1,4 triazole (6 carbon) alanine olefin amino acid connected by an all-carbon crosslinker comprising one double bond
  misc_feature (4)..(11): Crosslink between residues
  MOD_RES (11)..(11): Alpha-Me alkyne 1,4 triazole (5 carbon) alanine olefin amino acid connected by an all-carbon crosslinker comprising one double bond
  C-term NH2
LTFAAYWAQLASAL

SEQ ID NO: 1566 - protein, 14 aa, Artificial Sequence
  Description of Artificial Sequence: Synthetic peptide
  N-term Ac
  MOD_RES (4)..(4): Alpha-Me R-azide 1,4 triazole (6 carbon) alanine olefin amino acid connected by an all-carbon crosslinker comprising one double bond
  misc_feature (4)..(11): Crosslink between residues
  MOD_RES (11)..(11): Alpha-Me alkyne 1,4 triazole (5 carbon) alanine olefin amino acid connected by an all-carbon crosslinker comprising one double bond
  C-term NH2
LTFAAYWAQLASAM

SEQ ID NO: 1567 - protein, 14 aa, Artificial Sequence
  Description of Artificial Sequence: Synthetic peptide
  N-term Ac
  MOD_RES (4)..(4): Alpha-Me R-azide 1,4 triazole (6 carbon) alanine olefin amino acid connected by an all-carbon crosslinker comprising one double bond
  misc_feature (4)..(11): Crosslink between residues
  MOD_RES (11)..(11): Alpha-Me alkyne 1,4 triazole (5 carbon) alanine olefin amino acid connected by an all-carbon crosslinker comprising one double bond
  MOD_RES (14)..(14): homo-Leu
  C-term NH2
LTFAAYWAQLASAL

SEQ ID NO: 1568 - protein, 14 aa, Artificial Sequence
  Description of Artificial Sequence: Synthetic peptide
  N-term Ac
  MOD_RES (4)..(4): Alpha-Me R-azide 1,4 triazole (6 carbon) alanine olefin amino acid connected by an all-carbon crosslinker comprising one double bond
  misc_feature (4)..(11): Crosslink between residues
  MOD_RES (11)..(11): Alpha-Me alkyne 1,4 triazole (5 carbon) alanine olefin amino acid connected by an all-carbon crosslinker comprising one double bond
  C-term NH2
LTFAAYWAQLASAF

SEQ ID NO: 1569 - protein, 14 aa, Artificial Sequence
  Description of Artificial Sequence: Synthetic peptide
  N-term Ac
  MOD_RES (4)..(4): Alpha-Me R-azide 1,4 triazole (6 carbon) alanine olefin amino acid connected by an all-carbon crosslinker comprising one double bond
  misc_feature (4)..(11): Crosslink between residues
  MOD_RES (11)..(11): Alpha-Me alkyne 1,4 triazole (5 carbon) alanine olefin amino acid connected by an all-carbon crosslinker comprising one double bond
  C-term NH2
LTFAAYWAQLASAI

SEQ ID NO: 1570 - protein, 14 aa, Artificial Sequence
  Description of Artificial Sequence: Synthetic peptide
  N-term Ac
  MOD_RES (4)..(4): Alpha-Me R-azide 1,4 triazole (6 carbon) alanine olefin amino acid connected by an all-carbon crosslinker comprising one double bond
  misc_feature (4)..(11): Crosslink between residues
  MOD_RES (11)..(11): Alpha-Me alkyne 1,4 triazole (5 carbon) alanine olefin amino acid connected by an all-carbon crosslinker comprising one double bond
  MOD_RES (14)..(14): Cyclohexyl-Gly
  C-term NH2
LTFAAYWAQLASAG

SEQ ID NO: 1571 - protein, 14 aa, Artificial Sequence
  Description of Artificial Sequence: Synthetic peptide
  N-term Ac
  MOD_RES (4)..(4): Alpha-Me R-azide 1,4 triazole (6 carbon) alanine olefin amino acid connected by an all-carbon crosslinker comprising one double bond
  misc_feature (4)..(11): Crosslink between residues
  MOD_RES (11)..(11): Alpha-Me alkyne 1,4 triazole (5 carbon) alanine olefin amino acid connected by an all-carbon crosslinker comprising one double bond
  MOD_RES (14)..(14): 2-aminoisobutyric acid
  C-term NH2
LTFAAYWAQLASAX

SEQ ID NO: 1572 - protein, 14 aa, Artificial Sequence
  Description of Artificial Sequence: Synthetic peptide
  N-term Ac
  MOD_RES (4)..(4): Alpha-Me R-azide 1,4 triazole (6 carbon) alanine olefin amino acid connected by an all-carbon crosslinker comprising one double bond
  misc_feature (4)..(11): Crosslink between residues
  MOD_RES (11)..(11): Alpha-Me alkyne 1,4 triazole (5 carbon) alanine olefin amino acid connected by an all-carbon crosslinker comprising one double bond
  C-term NH2
LTFAAYWAQLASAA

SEQ ID NO: 1573 - protein, 14 aa, Artificial Sequence
  Description of Artificial Sequence: Synthetic peptide
  N-term Ac
  MOD_RES (4)..(4): Alpha-Me R-azide 1,4 triazole (6 carbon) alanine olefin amino acid connected by an all-carbon crosslinker comprising one double bond
  misc_feature (4)..(9): Crosslink between residues
  MOD_RES (9)..(9): Alpha-Me alkyne 1,4 triazole (5 carbon) alanine olefin amino acid connected by an all-carbon crosslinker comprising one double bond
  MOD_RES (11)..(11): Alpha-Me S5-pentenyl-alanine olefin amino acid connected by an all-carbon crosslinker comprising one double bond
  misc_feature (11)..(13): Crosslink between residues
  MOD_RES (13)..(13): Alpha-Me S5-pentenyl-alanine olefin amino acid connected by an all-carbon crosslinker comprising one double bond
  MOD_RES (14)..(14): Norleucine
  C-term NH2
LTFAAYWAALASAL

SEQ ID NO: 1574 - protein, 14 aa, Artificial Sequence
  Description of Artificial Sequence: Synthetic peptide
  N-term Ac
  MOD_RES (4)..(4): Alpha-Me R-azide 1,4 triazole (6 carbon) alanine olefin amino acid connected by an all-carbon crosslinker comprising one double bond
  misc_feature (4)..(9): Crosslink between residues
  MOD_RES (9)..(9): Alpha-Me alkyne 1,4 triazole (5 carbon) alanine olefin amino acid connected by an all-carbon crosslinker comprising one double bond
  MOD_RES (11)..(11): Alpha-Me S5-pentenyl-alanine olefin amino acid connected by an all-carbon crosslinker comprising one double bond
  misc_feature (11)..(13): Crosslink between residues
  MOD_RES (13)..(13): Alpha-Me S5-pentenyl-alanine olefin amino acid connected by an all-carbon crosslinker comprising one double bond
  C-term NH2
LTFAAYWAALASAA

SEQ ID NO: 1575 - protein, 12 aa, Artificial Sequence
  Description of Artificial Sequence: Synthetic peptide
  N-term Ac
  MOD_RES (2)..(2): Alpha-Me R-azide 1,4 triazole (6 carbon) alanine olefin amino acid connected by an all-carbon crosslinker comprising one double bond
  misc_feature (2)..(9): Crosslink between residues
  MOD_RES (7)..(7): Ac3c
  MOD_RES (9)..(9): Alpha-Me alkyne 1,4 triazole (5 carbon) alanine olefin amino acid connected by an all-carbon crosslinker comprising one double bond
  MOD_RES (12)..(12): Norleucine
  C-term NH2
FAAYWEXLAAAL

SEQ ID NO: 1576 - protein, 12 aa, Artificial Sequence
  Description of Artificial Sequence: Synthetic peptide
  N-term Ac
  MOD_RES (2)..(2): Alpha-Me R-azide 1,4 triazole (6 carbon) alanine olefin amino acid connected by an all-carbon crosslinker comprising one double bond
  misc_feature (2)..(9): Crosslink between residues
  MOD_RES (7)..(7): Ac3c
  MOD_RES (9)..(9): Alpha-Me alkyne 1,4 triazole (5 carbon) alanine olefin amino acid connected by an all-carbon crosslinker comprising one double bond
  C-term NH2
FAAYWEXLAAAL

SEQ ID NO: 1577 - protein, 12 aa, Artificial Sequence
  Description of Artificial Sequence: Synthetic peptide
  N-term Ac
  MOD_RES (2)..(2): Alpha-Me R-azide 1,4 triazole (6 carbon) alanine olefin amino acid connected by an all-carbon crosslinker comprising one double bond
  misc_feature (2)..(9): Crosslink between residues
  MOD_RES (7)..(7): Ac3c
  MOD_RES (9)..(9): Alpha-Me alkyne 1,4 triazole (5 carbon) alanine olefin amino acid connected by an all-carbon crosslinker comprising one double bond
  C-term NH2
FAAYWEXLAAAM

SEQ ID NO: 1578 - protein, 12 aa, Artificial Sequence
  Description of Artificial Sequence: Synthetic peptide
  N-term Ac
  MOD_RES (2)..(2): Alpha-Me R-azide 1,4 triazole (6 carbon) alanine olefin amino acid connected by an all-carbon crosslinker comprising one double bond
  misc_feature (2)..(9): Crosslink between residues
  MOD_RES (7)..(7): Ac3c
  MOD_RES (9)..(9): Alpha-Me alkyne 1,4 triazole (5 carbon) alanine olefin amino acid connected by an all-carbon crosslinker comprising one double bond
  MOD_RES (12)..(12): homo-Leu
  C-term NH2
FAAYWEXLAAAL

SEQ ID NO: 1579 - protein, 12 aa, Artificial Sequence
  Description of Artificial Sequence: Synthetic peptide
  N-term Ac
  MOD_RES (2)..(2): Alpha-Me R-azide 1,4 triazole (6 carbon) alanine olefin amino acid connected by an all-carbon crosslinker comprising one double bond
  misc_feature (2)..(9): Crosslink between residues
  MOD_RES (7)..(7): Ac3c
  MOD_RES (9)..(9): Alpha-Me alkyne 1,4 triazole (5 carbon) alanine olefin amino acid connected by an all-carbon crosslinker comprising one double bond
  C-term NH2
FAAYWEXLAAAF

SEQ ID NO: 1580 - protein, 12 aa, Artificial Sequence
  Description of Artificial Sequence: Synthetic peptide
  N-term Ac
  MOD_RES (2)..(2): Alpha-Me R-azide 1,4 triazole (6 carbon) alanine olefin amino acid connected by an all-carbon crosslinker comprising one double bond
  misc_feature (2)..(9): Crosslink between residues
  MOD_RES (7)..(7): Ac3c
  MOD_RES (9)..(9): Alpha-Me alkyne 1,4 triazole (5 carbon) alanine olefin amino acid connected by an all-carbon crosslinker comprising one double bond
  C-term NH2
FAAYWEXLAAAI

SEQ ID NO: 1581 - protein, 12 aa, Artificial Sequence
  Description of Artificial Sequence: Synthetic peptide
  N-term Ac
  MOD_RES (2)..(2): Alpha-Me R-azide 1,4 triazole (6 carbon) alanine olefin amino acid connected by an all-carbon crosslinker comprising one double bond
  misc_feature (2)..(9): Crosslink between residues
  MOD_RES (7)..(7): Ac3c
  MOD_RES (9)..(9): Alpha-Me alkyne 1,4 triazole (5 carbon) alanine olefin amino acid connected by an all-carbon crosslinker comprising one double bond
  MOD_RES (12)..(12): Cyclohexyl-Gly
  C-term NH2
FAAYWEXLAAAG

SEQ ID NO: 1582 - protein, 12 aa, Artificial Sequence
  Description of Artificial Sequence: Synthetic peptide
  N-term Ac
  MOD_RES (2)..(2): Alpha-Me R-azide 1,4 triazole (6 carbon) alanine olefin amino acid connected by an all-carbon crosslinker comprising one double bond
  misc_feature (2)..(9): Crosslink between residues
  MOD_RES (7)..(7): Ac3c
  MOD_RES (9)..(9): Alpha-Me alkyne 1,4 triazole (5 carbon) alanine olefin amino acid connected by an all-carbon crosslinker comprising one double bond
  MOD_RES (12)..(12): Cyclohexyl-Ala
  C-term NH2
FAAYWEXLAAAA

SEQ ID NO: 1583 - protein, 12 aa, Artificial Sequence
  Description of Artificial Sequence: Synthetic peptide
  N-term Ac
  MOD_RES (2)..(2): Alpha-Me R-azide 1,4 triazole (6 carbon) alanine olefin amino acid connected by an all-carbon crosslinker comprising one double bond
  misc_feature (2)..(9): Crosslink between residues
  MOD_RES (7)..(7): Ac3c
  MOD_RES (9)..(9): Alpha-Me alkyne 1,4 triazole (5 carbon) alanine olefin amino acid connected by an all-carbon crosslinker comprising one double bond
  MOD_RES (12)..(12): 2-aminoisobutyric acid
  C-term NH2
FAAYWEXLAAAX

SEQ ID NO: 1584 - protein, 15 aa, Artificial Sequence
  Description of Artificial Sequence: Synthetic peptide
  N-term Ac
  MOD_RES (4)..(4): Alpha-Me R-azide 1,4 triazole (6 carbon) alanine olefin amino acid connected by an all-carbon crosslinker comprising one double bond
  misc_feature (4)..(11): Crosslink between residues
  MOD_RES (11)..(11): Alpha-Me alkyne 1,4 triazole (5 carbon) alanine olefin amino acid connected by an all-carbon crosslinker comprising one double bond
  MOD_RES (14)..(14): 2-aminoisobutyric acid
  C-term NH2
LTFAAYWAQLAAAXV

SEQ ID NO: 1585 - protein, 15 aa, Artificial Sequence
  Description of Artificial Sequence: Synthetic peptide
  N-term Ac
  MOD_RES (4)..(4): Alpha-Me R-azide 1,4 triazole (6 carbon) alanine olefin amino acid connected by an all-carbon crosslinker comprising one double bond
  misc_feature (4)..(11): Crosslink between residues
  MOD_RES (11)..(11): Alpha-Me alkyne 1,4 triazole (5 carbon) alanine olefin amino acid connected by an all-carbon crosslinker comprising one double bond
  MOD_RES (14)..(14): 2-aminoisobutyric acid
  C-term NH2
LTFAAYWAQLAAAXV

SEQ ID NO: 1586 - protein, 15 aa, Artificial Sequence
  Description of Artificial Sequence: Synthetic peptide
  N-term Ac
  MOD_RES (4)..(4): Alpha-Me R-azide 1,4 triazole (6 carbon) alanine olefin amino acid connected by an all-carbon crosslinker comprising one double bond
  misc_feature (4)..(11): Crosslink between residues
  MOD_RES (11)..(11): Alpha-Me alkyne 1,4 triazole (5 carbon) alanine olefin amino acid connected by an all-carbon crosslinker comprising one double bond
  MOD_RES (13)..(13): 2-aminoisobutyric acid
  C-term NH2
LTFAAYWAQLASXAA

SEQ ID NO: 1587 - protein, 15 aa, Artificial Sequence
  Description of Artificial Sequence: Synthetic peptide
  N-term Ac
  MOD_RES (4)..(4): Alpha-Me R-azide 1,4 triazole (6 carbon) alanine olefin amino acid connected by an all-carbon crosslinker comprising one double bond
  misc_feature (4)..(11): Crosslink between residues
  MOD_RES (11)..(11): Alpha-Me alkyne 1,4 triazole (5 carbon) alanine olefin amino acid connected by an all-carbon crosslinker comprising one double bond
  MOD_RES (13)..(13): 2-aminoisobutyric acid
  C-term NH2
LTFAAYWAQLASXAA

SEQ ID NO: 1588 - protein, 16 aa, Artificial Sequence
  Description of Artificial Sequence: Synthetic peptide
  N-term Ac
  MOD_RES (5)..(5): Alpha-Me R-azide 1,4 triazole (6 carbon) alanine olefin amino acid connected by an all-carbon crosslinker comprising one double bond
  misc_feature (5)..(12): Crosslink between residues
  MOD_RES (12)..(12): Alpha-Me alkyne 1,4 triazole (5 carbon) alanine olefin amino acid connected by an all-carbon crosslinker comprising one double bond
  MOD_RES (15)..(16): Norleucine
  C-term NH2
HLTFAHHWHQLAAALL

SEQ ID NO: 1589 - protein, 16 aa, Artificial Sequence
  Description of Artificial Sequence: Synthetic peptide
  N-term Ac
  MOD_RES (5)..(5): Alpha-Me R-azide 1,4 triazole (6 carbon) alanine olefin amino acid connected by an all-carbon crosslinker comprising one double bond
  misc_feature (5)..(12): Crosslink between residues
  MOD_RES (12)..(12): Alpha-Me alkyne 1,4 triazole (5 carbon) alanine olefin amino acid connected by an all-carbon crosslinker comprising one double bond
  C-term NH2
DLTFAHHWHQLARRLV

SEQ ID NO: 1590 - protein, 16 aa, Artificial Sequence
  Description of Artificial Sequence: Synthetic peptide
  N-term Ac
  MOD_RES (5)..(5): Alpha-Me R-azide 1,4 triazole (6 carbon) alanine olefin amino acid connected by an all-carbon crosslinker comprising one double bond
  misc_feature (5)..(12): Crosslink between residues
  MOD_RES (12)..(12): Alpha-Me alkyne 1,4 triazole (5 carbon) alanine olefin amino acid connected by an all-carbon crosslinker comprising one double bond
  C-term NH2
HHTFAHHWHQLAAAML

SEQ ID NO: 1591 - protein, 13 aa, Artificial Sequence
  Description of Artificial Sequence: Synthetic peptide
  N-term Ac
  MOD_RES (2)..(2): Alpha-Me R-azide 1,4 triazole (6 carbon) alanine olefin amino acid connected by an all-carbon crosslinker comprising one double bond
  misc_feature (2)..(9): Crosslink between residues
  MOD_RES (9)..(9): Alpha-Me alkyne 1,4 triazole (5 carbon) alanine olefin amino acid connected by an all-carbon crosslinker comprising one double bond
  MOD_RES (13)..(13): Cyclohexyl-Ala
  C-term NH2
FAHHWHQLARRDA

SEQ ID NO: 1592 - protein, 13 aa, Artificial Sequence
  Description of Artificial Sequence: Synthetic peptide
  N-term Ac
  MOD_RES (2)..(2): Alpha-Me R-azide 1,4 triazole (6 carbon) alanine olefin amino acid connected by an all-carbon crosslinker comprising one double bond
  misc_feature (2)..(9): Crosslink between residues
  MOD_RES (9)..(9): Alpha-Me alkyne 1,4 triazole (5 carbon) alanine olefin amino acid connected by an all-carbon crosslinker comprising one double bond
  C-term NH2
FAHHWHQLAHRFV

SEQ ID NO: 1593 - protein, 16 aa, Artificial Sequence
  Description of Artificial Sequence: Synthetic peptide
  N-term Ac
  MOD_RES (5)..(5): Alpha-Me R-azide 1,4 triazole (6 carbon) alanine olefin amino acid connected by an all-carbon crosslinker comprising one double bond
  misc_feature (5)..(12): Crosslink between residues
  MOD_RES (12)..(12): Alpha-Me alkyne 1,4 triazole (5 carbon) alanine olefin amino acid connected by an all-carbon crosslinker comprising one double bond
  MOD_RES (15)..(15): homo-Leu
  C-term NH2
HLTFAHHWHQLAAALA

SEQ ID NO: 1594 - protein, 16 aa, Artificial Sequence
  Description of Artificial Sequence: Synthetic peptide
  N-term Ac
  MOD_RES (5)..(5): Alpha-Me R-azide 1,4 triazole (6 carbon) alanine olefin amino acid connected by an all-carbon crosslinker comprising one double bond
  misc_feature (5)..(12): Crosslink between residues
  MOD_RES (12)..(12): Alpha-Me alkyne 1,4 triazole (5 carbon) alanine olefin amino acid connected by an all-carbon crosslinker comprising one double bond
  MOD_RES (15)..(15): Cyclohexyl-Gly
  MOD_RES (16)..(16): D-amino acid
  C-term NH2
DLTFAHHWHQLARRGL

SEQ ID NO: 1595 - protein, 16 aa, Artificial Sequence
  Description of Artificial Sequence: Synthetic peptide
  N-term Ac
  MOD_RES (5)..(5): Alpha-Me R-azide 1,4 triazole (6 carbon) alanine olefin amino acid connected by an all-carbon crosslinker comprising one double bond
  misc_feature (5)..(12): Crosslink between residues
  MOD_RES (12)..(12): Alpha-Me alkyne 1,4 triazole (5 carbon) alanine olefin amino acid connected by an all-carbon crosslinker comprising one double bond
  MOD_RES (15)..(15): Cyclohexyl-Gly
  MOD_RES (16)..(16): D-amino acid
  C-term NH2
DLTFAHHWHQLARRGL

SEQ ID NO: 1596 - protein, 16 aa, Artificial Sequence
  Description of Artificial Sequence: Synthetic peptide
  N-term Ac
  MOD_RES (5)..(5): Alpha-Me R-azide 1,4 triazole (6 carbon) alanine olefin amino acid connected by an all-carbon crosslinker comprising one double bond
  misc_feature (5)..(12): Crosslink between residues
  MOD_RES (12)..(12): Alpha-Me alkyne 1,4 triazole (5 carbon) alanine olefin amino acid connected by an all-carbon crosslinker comprising one double bond
  MOD_RES (15)..(15): Cyclohexyl-Ala
  MOD_RES (16)..(16): D-amino acid
  C-term NH2
HHTFAHHWHQLAAAAV

SEQ ID NO: 1597 - protein, 13 aa, Artificial Sequence
  Description of Artificial Sequence: Synthetic peptide
  N-term Ac
  MOD_RES (2)..(2): Alpha-Me R-azide 1,4 triazole (6 carbon) alanine olefin amino acid connected by an all-carbon crosslinker comprising one double bond
  misc_feature (2)..(9): Crosslink between residues
  MOD_RES (9)..(9): Alpha-Me alkyne 1,4 triazole (5 carbon) alanine olefin amino acid connected by an all-carbon crosslinker comprising one double bond
  MOD_RES (13)..(13): D-amino acid
  C-term NH2
FAHHWHQLARRDA

SEQ ID NO: 1598 - protein, 13 aa, Artificial Sequence
  Description of Artificial Sequence: Synthetic peptide
  N-term Ac
  MOD_RES (2)..(2): Alpha-Me R-azide 1,4 triazole (6 carbon) alanine olefin amino acid connected by an all-carbon crosslinker comprising one double bond
  misc_feature (2)..(9): Crosslink between residues
  MOD_RES (9)..(9): Alpha-Me alkyne 1,4 triazole (5 carbon) alanine olefin amino acid connected by an all-carbon crosslinker comprising one double bond
  MOD_RES (12)..(12): 2-aminoisobutyric acid
  C-term NH2
FAHHWHQLAHRXG

SEQ ID NO: 1599 - protein, 13 aa, Artificial Sequence
  Description of Artificial Sequence: Synthetic peptide
  N-term Ac
  MOD_RES (2)..(2): Alpha-Me R-azide 1,4 triazole (6 carbon) alanine olefin amino acid connected by an all-carbon crosslinker comprising one double bond
  misc_feature (2)..(9): Crosslink between residues
  MOD_RES (9)..(9): Alpha-Me alkyne 1,4 triazole (5 carbon) alanine olefin amino acid connected by an all-carbon crosslinker comprising one double bond
  MOD_RES (12)..(12): Norleucine
  C-term NH2
FAAYWAQLAHHLL

SEQ ID NO: 1600 - protein, 13 aa, Artificial Sequence
  Description of Artificial Sequence: Synthetic peptide
  N-term Ac
  MOD_RES (2)..(2): Alpha-Me R-azide 1,4 triazole (6 carbon) alanine olefin amino acid connected by an all-carbon crosslinker comprising one double bond
  misc_feature (2)..(9): Crosslink between residues
  MOD_RES (9)..(9): Alpha-Me alkyne 1,4 triazole (5 carbon) alanine olefin amino acid connected by an all-carbon crosslinker comprising one double bond
  MOD_RES (13)..(13): Norleucine
  C-term NH2
FAAYWSALAHQAL

SEQ ID NO: 1601 - protein, 13 aa, Artificial Sequence
  Description of Artificial Sequence: Synthetic peptide
  N-term Ac
  MOD_RES (2)..(2): Alpha-Me R-azide 1,4 triazole (6 carbon) alanine olefin amino acid connected by an all-carbon crosslinker comprising one double bond
  misc_feature (2)..(9): Crosslink between residues
  MOD_RES (9)..(9): Alpha-Me alkyne 1,4 triazole (5 carbon) alanine olefin amino acid connected by an all-carbon crosslinker comprising one double bond
  MOD_RES (12)..(12): Cyclohexyl-Gly
  MOD_RES (13)..(13): D-amino acid
  C-term NH2
FAAYWVQLAQHGL

SEQ ID NO: 1602 - protein, 13 aa, Artificial Sequence
  Description of Artificial Sequence: Synthetic peptide
  N-term Ac
  MOD_RES (2)..(2): Alpha-Me R-azide 1,4 triazole (6 carbon) alanine olefin amino acid connected by an all-carbon crosslinker comprising one double bond
  misc_feature (2)..(9): Crosslink between residues
  MOD_RES (9)..(9): Alpha-Me alkyne 1,4 triazole (5 carbon) alanine olefin amino acid connected by an all-carbon crosslinker comprising one double bond
  MOD_RES (12)..(12): Norleucine
  MOD_RES (13)..(13): D-amino acid
  C-term NH2
FAAYWTALAQQLV

SEQ ID NO: 1603 - protein, 13 aa, Artificial Sequence
  Description of Artificial Sequence: Synthetic peptide
  N-term Ac
  MOD_RES (2)..(2): Alpha-Me R-azide 1,4 triazole (6 carbon) alanine olefin amino acid connected by an all-carbon crosslinker comprising one double bond
  misc_feature (2)..(9): Crosslink between residues
  MOD_RES (9)..(9): Alpha-Me alkyne 1,4 triazole (5 carbon) alanine olefin amino acid connected by an all-carbon crosslinker comprising one double bond
  MOD_RES (11)..(11): 2-aminoisobutyric acid
  MOD_RES (13)..(13): D-amino acid
  C-term NH2
FAAYWYQLAHXAA

SEQ ID NO: 1604 - protein, 15 aa, Artificial Sequence
  Description of Artificial Sequence: Synthetic peptide
  N-term Ac
  MOD_RES (4)..(4): Alpha-Me R-azide 1,4 triazole (6 carbon) alanine olefin amino acid connected by an all-carbon crosslinker comprising one double bond
  misc_feature (4)..(11): Crosslink between residues
  MOD_RES (11)..(11): Alpha-Me alkyne 1,4 triazole (5 carbon) alanine olefin amino acid connected by an all-carbon crosslinker comprising one double bond
  MOD_RES (15)..(15): D-amino acid
  C-term NH2
LTFAAYWAQLAHHLA

SEQ ID NO: 1605 - protein, 15 aa, Artificial Sequence
  Description of Artificial Sequence: Synthetic peptide
  N-term Ac
  MOD_RES (4)..(4): Alpha-Me R-azide 1,4 triazole (6 carbon) alanine olefin amino acid connected by an all-carbon crosslinker comprising one double bond
  misc_feature (4)..(11): Crosslink between residues
  MOD_RES (11)..(11): Alpha-Me alkyne 1,4 triazole (5 carbon) alanine olefin amino acid connected by an all-carbon crosslinker comprising one double bond
  MOD_RES (15)..(15): D-amino acid
  C-term NH2
LTFAAYWAQLAHHLA

SEQ ID NO: 1606 - protein, 15 aa, Artificial Sequence
  Description of Artificial Sequence: Synthetic peptide
  N-term Ac
  MOD_RES (4)..(4): Alpha-Me R-azide 1,4 triazole (6 carbon) alanine olefin amino acid connected by an all-carbon crosslinker comprising one double bond
  misc_feature (4)..(11): Crosslink between residues
  MOD_RES (11)..(11): Alpha-Me alkyne 1,4 triazole (5 carbon) alanine olefin amino acid connected by an all-carbon crosslinker comprising one double bond
  MOD_RES (14)..(14): Norleucine
  MOD_RES (15)..(15): D-amino acid
  C-term NH2
LTFAAYWAQLAHQLV

SEQ ID NO: 1607 - protein, 15 aa, Artificial Sequence
  Description of Artificial Sequence: Synthetic peptide
  N-term Ac
  MOD_RES (4)..(4): Alpha-Me R-azide 1,4 triazole (6 carbon) alanine olefin amino acid connected by an all-carbon crosslinker comprising one double bond
  misc_feature (4)..(11): Crosslink between residues
  MOD_RES (11)..(11): Alpha-Me alkyne 1,4 triazole (5 carbon) alanine olefin amino acid connected by an all-carbon crosslinker comprising one double bond
  MOD_RES (14)..(14): Norleucine
  MOD_RES (15)..(15): D-amino acid
  C-term NH2
LTFAAYWAQLAHQLV

SEQ ID NO: 1608 - protein, 15 aa, Artificial Sequence
  Description of Artificial Sequence: Synthetic peptide
  N-term Ac
  MOD_RES (4)..(4): Alpha-Me R-azide 1,4 triazole (6 carbon) alanine olefin amino acid connected by an all-carbon crosslinker comprising one double bond
  misc_feature (4)..(11): Crosslink between residues
  MOD_RES (11)..(11): Alpha-Me alkyne 1,4 triazole (5 carbon) alanine olefin amino acid connected by an all-carbon crosslinker comprising one double bond
  MOD_RES (15)..(15): D-amino acid
  C-term NH2
LTFAAYWAQLAQQML

SEQ ID NO: 1609 - protein, 15 aa, Artificial Sequence
  Description of Artificial Sequence: Synthetic peptide
  N-term Ac
  MOD_RES (4)..(4): Alpha-Me R-azide 1,4 triazole (6 carbon) alanine olefin amino acid connected by an all-carbon crosslinker comprising one double bond
  misc_feature (4)..(11): Crosslink between residues
  MOD_RES (11)..(11): Alpha-Me alkyne 1,4 triazole (5 carbon) alanine olefin amino acid connected by an all-carbon crosslinker comprising one double bond
  MOD_RES (15)..(15): D-amino acid
  C-term NH2
LTFAAYWAQLAQQML

SEQ ID NO: 1610 - protein, 15 aa, Artificial Sequence
  Description of Artificial Sequence: Synthetic peptide
  N-term Ac
  MOD_RES (4)..(4): Alpha-Me R-azide 1,4 triazole (6 carbon) alanine olefin amino acid connected by an all-carbon crosslinker comprising one double bond
  misc_feature (4)..(11): Crosslink between residues
  MOD_RES (11)..(11): Alpha-Me alkyne 1,4 triazole (5 carbon) alanine olefin amino acid connected by an all-carbon crosslinker comprising one double bond
  MOD_RES (13)..(13): 2-aminoisobutyric acid
  MOD_RES (14)..(14): homo-Leu
  C-term NH2
LTFAAYWAQLAHXLV

SEQ ID NO: 1611 - protein, 15 aa, Artificial Sequence
  Description of Artificial Sequence: Synthetic peptide
  N-term Ac
  MOD_RES (4)..(4): Alpha-Me R-azide 1,4 triazole (6 carbon) alanine olefin amino acid connected by an all-carbon crosslinker comprising one double bond
  misc_feature (4)..(11): Crosslink between residues
  MOD_RES (11)..(11): Alpha-Me alkyne 1,4 triazole (5 carbon) alanine olefin amino acid connected by an all-carbon crosslinker comprising one double bond
  C-term NH2
LTFAAYWAQLAAHFA

SEQ ID NO: 1612 - protein, 16 aa, Artificial Sequence
  Description of Artificial Sequence: Synthetic peptide
  N-term Ac
  MOD_RES (5)..(5): Alpha-Me R-azide 1,4 triazole (6 carbon) alanine olefin amino acid connected by an all-carbon crosslinker comprising one double bond
  misc_feature (5)..(12): Crosslink between residues
  MOD_RES (12)..(12): Alpha-Me alkyne 1,4 triazole (5 carbon) alanine olefin amino acid connected by an all-carbon crosslinker comprising one double bond
  MOD_RES (15)..(15): Norleucine
  MOD_RES (16)..(16): D-amino acid
  C-term NH2
HLTFAHHWHQLAAALL

SEQ ID NO: 1613 - protein, 16 aa, Artificial Sequence
  Description of Artificial Sequence: Synthetic peptide
  N-term Ac
  MOD_RES (5)..(5): Alpha-Me R-azide 1,4 triazole (6 carbon) alanine olefin amino acid connected by an all-carbon crosslinker comprising one double bond
  misc_feature (5)..(12): Crosslink between residues
  MOD_RES (12)..(12): Alpha-Me alkyne 1,4 triazole (5 carbon) alanine olefin amino acid connected by an all-carbon crosslinker comprising one double bond
  MOD_RES (16)..(16): D-amino acid
  C-term NH2
DLTFAHHWHQLARRLA

SEQ ID NO: 1614 - protein, 16 aa, Artificial Sequence
  Description of Artificial Sequence: Synthetic peptide
  N-term Ac
  MOD_RES (5)..(5): Alpha-Me R-azide 1,4 triazole (6 carbon) alanine olefin amino acid connected by an all-carbon crosslinker comprising one double bond
  misc_feature (5)..(12): Crosslink between residues
  MOD_RES (12)..(12): Alpha-Me alkyne 1,4 triazole (5 carbon) alanine olefin amino acid connected by an all-carbon crosslinker comprising one double bond
  MOD_RES (16)..(16): D-amino acid
  C-term NH2
HHTFAHHWHQLAAAMV

SEQ ID NO: 1615 - protein, 13 aa, Artificial Sequence
  Description of Artificial Sequence: Synthetic peptide
  N-term Ac
  MOD_RES (2)..(2): Alpha-Me R-azide 1,4 triazole (6 carbon) alanine olefin amino acid connected by an all-carbon crosslinker comprising one double bond
  misc_feature (2)..(9): Crosslink between residues
  MOD_RES (9)..(9): Alpha-Me alkyne 1,4 triazole (5 carbon) alanine olefin amino acid connected by an all-carbon crosslinker comprising one double bond
  C-term NH2
FAHHWHQLARRDA

SEQ ID NO: 1616 - protein, 13 aa, Artificial Sequence
  Description of Artificial Sequence: Synthetic peptide
  N-term Ac
  MOD_RES (2)..(2): Alpha-Me R-azide 1,4 triazole (6 carbon) alanine olefin amino acid connected by an all-carbon crosslinker comprising one double bond
  misc_feature (2)..(9): Crosslink between residues
  MOD_RES (9)..(9): Alpha-Me alkyne 1,4 triazole (5 carbon) alanine olefin amino acid connected by an all-carbon crosslinker comprising one double bond
  MOD_RES (13)..(13): Cyclohexyl-Ala
  C-term NH2
FAHHWHQLAHRFA

SEQ ID NO: 1617 - protein, 11 aa, Artificial Sequence
  Description of Artificial Sequence: Synthetic peptide
  N-term Ac
  MOD_RES (2)..(2): Alpha-Me R-azide 1,4 triazole (6 carbon) alanine olefin amino acid connected by an all-carbon crosslinker comprising one double bond
  misc_feature (2)..(9): Crosslink between residues
  MOD_RES (9)..(9): Alpha-Me alkyne 1,4 triazole (5 carbon) alanine olefin amino acid connected by an all-carbon crosslinker comprising one double bond
  C-term NHAm
FAAYWEALAAA

SEQ ID NO: 1618 - protein, 11 aa, Artificial Sequence
  Description of Artificial Sequence: Synthetic peptide
  N-term Ac
  MOD_RES (2)..(2): Alpha-Me R-azide 1,4 triazole (6 carbon) alanine olefin amino acid connected by an all-carbon crosslinker comprising one double bond
  misc_feature (2)..(9): Crosslink between residues
  MOD_RES (9)..(9): Alpha-Me alkyne 1,4 triazole (5 carbon) alanine olefin amino acid connected by an all-carbon crosslinker comprising one double bond
  C-term NHiAm
FAAYWEALAAA

SEQ ID NO: 1619 - protein, 11 aa, Artificial Sequence
  Description of Artificial Sequence: Synthetic peptide
  N-term Ac
  MOD_RES (2)..(2): Alpha-Me R-azide 1,4 triazole (6 carbon) alanine olefin amino acid connected by an all-carbon crosslinker comprising one double bond
  misc_feature (2)..(9): Crosslink between residues
  MOD_RES (9)..(9): Alpha-Me alkyne 1,4 triazole (5 carbon) alanine olefin amino acid connected by an all-carbon crosslinker comprising one double bond
  C-term NHnPr3Ph
FAAYWEALAAA

SEQ ID NO: 1620 - protein, 11 aa, Artificial Sequence
  Description of Artificial Sequence: Synthetic peptide
  N-term Ac
  MOD_RES (2)..(2): Alpha-Me R-azide 1,4 triazole (6 carbon) alanine olefin amino acid connected by an all-carbon crosslinker comprising one double bond
  misc_feature (2)..(9): Crosslink between residues
  MOD_RES (9)..(9): Alpha-Me alkyne 1,4 triazole (5 carbon) alanine olefin amino acid connected by an all-carbon crosslinker comprising one double bond
  C-term NHnBu33Me
FAAYWEALAAA

SEQ ID NO: 1621 - protein, 11 aa, Artificial Sequence
  Description of Artificial Sequence: Synthetic peptide
  N-term Ac
  MOD_RES (2)..(2): Alpha-Me R-azide 1,4 triazole (6 carbon) alanine olefin amino acid connected by an all-carbon crosslinker comprising one double bond
  misc_feature (2)..(9): Crosslink between residues
  MOD_RES (9)..(9): Alpha-Me alkyne 1,4 triazole (5 carbon) alanine olefin amino acid connected by an all-carbon crosslinker comprising one double bond
  C-term NHnPr
FAAYWEALAAA

SEQ ID NO: 1622 - protein, 11 aa, Artificial Sequence
  Description of Artificial Sequence: Synthetic peptide
  N-term Ac
  MOD_RES (2)..(2): Alpha-Me R-azide 1,4 triazole (6 carbon) alanine olefin amino acid connected by an all-carbon crosslinker comprising one double bond
  misc_feature (2)..(9): Crosslink between residues
  MOD_RES (9)..(9): Alpha-Me alkyne 1,4 triazole (5 carbon) alanine olefin amino acid connected by an all-carbon crosslinker comprising one double bond
  C-term NHnEt2Ch
FAAYWEALAAA

SEQ ID NO: 1623 - protein, 11 aa, Artificial Sequence
  Description of Artificial Sequence: Synthetic peptide
  N-term Ac
  MOD_RES (2)..(2): Alpha-Me R-azide 1,4 triazole (6 carbon) alanine olefin amino acid connected by an all-carbon crosslinker comprising one double bond
  misc_feature (2)..(9): Crosslink between residues
  MOD_RES (9)..(9): Alpha-Me alkyne 1,4 triazole (5 carbon) alanine olefin amino acid connected by an all-carbon crosslinker comprising one double bond
  C-term NHnEt2Cp
FAAYWEALAAA

SEQ ID NO: 1624 - protein, 11 aa, Artificial Sequence
  Description of Artificial Sequence: Synthetic peptide
  N-term Ac
  MOD_RES (2)..(2): Alpha-Me R-azide 1,4 triazole (6 carbon) alanine olefin amino acid connected by an all-carbon crosslinker comprising one double bond
  misc_feature (2)..(9): Crosslink between residues
  MOD_RES (9)..(9): Alpha-Me alkyne 1,4 triazole (5 carbon) alanine olefin amino acid connected by an all-carbon crosslinker comprising one double bond
  C-term NHHex
FAAYWEALAAA

SEQ ID NO: 1625 - protein, 15 aa, Artificial Sequence
  Description of Artificial Sequence: Synthetic peptide
  N-term Ac
  MOD_RES (4)..(4): Alpha-Me R-azide 1,4 triazole (6 carbon) alanine olefin amino acid connected by an all-carbon crosslinker comprising one double bond
  misc_feature (4)..(11): Crosslink between residues
  MOD_RES (11)..(11): Alpha-Me alkyne 1,4 triazole (5 carbon) alanine olefin amino acid connected by an all-carbon crosslinker comprising one double bond
  C-term NH2
LTFAAYWAQLAAAIA

SEQ ID NO: 1626 - protein, 15 aa, Artificial Sequence
  Description of Artificial Sequence: Synthetic peptide
  N-term Ac
  MOD_RES (4)..(4): Alpha-Me R-azide 1,4 triazole (6 carbon) alanine olefin amino acid connected by an all-carbon crosslinker comprising one double bond
  misc_feature (4)..(11): Crosslink between residues
  MOD_RES (11)..(11): Alpha-Me alkyne 1,4 triazole (5 carbon) alanine olefin amino acid connected by an all-carbon crosslinker comprising one double bond
  C-term NH2
LTFAAYWAQLAAAIA

SEQ ID NO: 1627 - protein, 15 aa, Artificial Sequence
  Description of Artificial Sequence: Synthetic peptide
  N-term Ac
  MOD_RES (4)..(4): Alpha-Me R-azide 1,4 triazole (6 carbon) alanine olefin amino acid connected by an all-carbon crosslinker comprising one double bond
  misc_feature (4)..(11): Crosslink between residues
  MOD_RES (11)..(11): Alpha-Me alkyne 1,4 triazole (5 carbon) alanine olefin amino acid connected by an all-carbon crosslinker comprising one double bond
  C-term NH2
LTFAAYWAALAAAMA

SEQ ID NO: 1628 - protein, 15 aa, Artificial Sequence
  Description of Artificial Sequence: Synthetic peptide
  N-term Ac
  MOD_RES (4)..(4): Alpha-Me R-azide 1,4 triazole (6 carbon) alanine olefin amino acid connected by an all-carbon crosslinker comprising one double bond
  misc_feature (4)..(11): Crosslink between residues
  MOD_RES (11)..(11): Alpha-Me alkyne 1,4 triazole (5 carbon) alanine olefin amino acid connected by an all-carbon crosslinker comprising one double bond
  C-term NH2
LTFAAYWAALAAAMA

SEQ ID NO: 1629 - protein, 15 aa, Artificial Sequence
  Description of Artificial Sequence: Synthetic peptide
  N-term Ac
  MOD_RES (4)..(4): Alpha-Me R-azide 1,4 triazole (6 carbon) alanine olefin amino acid connected by an all-carbon crosslinker comprising one double bond
  misc_feature (4)..(11): Crosslink between residues
  MOD_RES (11)..(11): Alpha-Me alkyne 1,4 triazole (5 carbon) alanine olefin amino acid connected by an all-carbon crosslinker comprising one double bond
  MOD_RES (14)..(14): Norleucine
  C-term NH2
LTFAAYWAQLAAALA

SEQ ID NO: 1630 - protein, 15 aa, Artificial Sequence
  Description of Artificial Sequence: Synthetic peptide
  N-term Ac
  MOD_RES (4)..(4): Alpha-Me R-azide 1,4 triazole (6 carbon) alanine olefin amino acid connected by an all-carbon crosslinker comprising one double bond
  misc_feature (4)..(11): Crosslink between residues
  MOD_RES (11)..(11): Alpha-Me alkyne 1,4 triazole (5 carbon) alanine olefin amino acid connected by an all-carbon crosslinker comprising one double bond
  MOD_RES (14)..(14): Norleucine
  C-term NH2
LTFAAYWAQLAAALA

SEQ ID NO: 1631 - protein, 15 aa, Artificial Sequence
  Description of Artificial Sequence: Synthetic peptide
  N-term Ac
  MOD_RES (4)..(4): Alpha-Me R-azide 1,4 triazole (6 carbon) alanine olefin amino acid connected by an all-carbon crosslinker comprising one double bond
  misc_feature (4)..(11): Crosslink between residues
  MOD_RES (11)..(11): Alpha-Me alkyne 1,4 triazole (5 carbon) alanine olefin amino acid connected by an all-carbon crosslinker comprising one double bond
  MOD_RES (15)..(15): D-amino acid
  C-term NH2
LTFAAYWAQLAAAIA

SEQ ID NO: 1632 - protein, 15 aa, Artificial Sequence
  Description of Artificial Sequence: Synthetic peptide
  N-term Ac
  MOD_RES (4)..(4): Alpha-Me R-azide 1,4 triazole (6 carbon) alanine olefin amino acid connected by an all-carbon crosslinker comprising one double bond
  misc_feature (4)..(11): Crosslink between residues
  MOD_RES (11)..(11): Alpha-Me alkyne 1,4 triazole (5 carbon) alanine olefin amino acid connected by an all-carbon crosslinker comprising one double bond
  MOD_RES (15)..(15): D-amino acid
  C-term NH2
LTFAAYWAQLAAAIA

SEQ ID NO: 1633 - protein, 15 aa, Artificial Sequence
  Description of Artificial Sequence: Synthetic peptide
  N-term Ac
  MOD_RES (4)..(4): Alpha-Me R-azide 1,4 triazole (6 carbon) alanine olefin amino acid connected by an all-carbon crosslinker comprising one double bond
  misc_feature (4)..(11): Crosslink between residues
  MOD_RES (11)..(11): Alpha-Me alkyne 1,4 triazole (5 carbon) alanine olefin amino acid connected by an all-carbon crosslinker comprising one double bond
  MOD_RES (15)..(15): D-amino acid
  C-term NH2
LTFAAYWAALAAAMA

SEQ ID NO: 1634 - protein, 15 aa, Artificial Sequence
  Description of Artificial Sequence: Synthetic peptide
  N-term Ac
  MOD_RES (4)..(4): Alpha-Me R-azide 1,4 triazole (6 carbon) alanine olefin amino acid connected by an all-carbon crosslinker comprising one double bond
  misc_feature (4)..(11): Crosslink between residues
  MOD_RES (11)..(11): Alpha-Me alkyne 1,4 triazole (5 carbon) alanine olefin amino acid connected by an all-carbon crosslinker comprising one double bond
  MOD_RES (15)..(15): D-amino acid
  C-term NH2
LTFAAYWAALAAAMA

SEQ ID NO: 1635 - protein, 15 aa, Artificial Sequence
  Description of Artificial Sequence: Synthetic peptide
  N-term Ac
  MOD_RES (4)..(4): Alpha-Me R-azide 1,4 triazole (6 carbon) alanine olefin amino acid connected by an all-carbon crosslinker comprising one double bond
  misc_feature (4)..(11): Crosslink between residues
  MOD_RES (11)..(11): Alpha-Me alkyne 1,4 triazole (5 carbon) alanine olefin amino acid connected by an all-carbon crosslinker comprising one double bond
  MOD_RES (14)..(14): Norleucine
  MOD_RES (15)..(15): D-amino acid
  C-term NH2
LTFAAYWAQLAAALA

SEQ ID NO: 1636 - protein, 15 aa, Artificial Sequence
  Description of Artificial Sequence: Synthetic peptide
  N-term Ac
  MOD_RES (4)..(4): Alpha-Me R-azide 1,4 triazole (6 carbon) alanine olefin amino acid connected by an all-carbon crosslinker comprising one double bond
  misc_feature (4)..(11): Crosslink between residues
  MOD_RES (11)..(11): Alpha-Me alkyne 1,4 triazole (5 carbon) alanine olefin amino acid connected by an all-carbon crosslinker comprising one double bond
  MOD_RES (14)..(14): Norleucine
  MOD_RES (15)..(15): D-amino acid
  C-term NH2
LTFAAYWAQLAAALA

SEQ ID NO: 1637 - protein, 15 aa, Artificial Sequence
  Description of Artificial Sequence: Synthetic peptide
  N-term Ac
  MOD_RES (4)..(4): Alpha-Me R-azide 1,4 triazole (6 carbon) alanine olefin amino acid connected by an all-carbon crosslinker comprising one double bond
  misc_feature (4)..(11): Crosslink between residues
  MOD_RES (11)..(11): Alpha-Me alkyne 1,4 triazole (5 carbon) alanine olefin amino acid connected by an all-carbon crosslinker comprising one double bond
  MOD_RES (15)..(15): D-amino acid
  C-term NH2
LTFAAYWAALAAAIV

SEQ ID NO: 1638 - protein, 15 aa, Artificial Sequence
  Description of Artificial Sequence: Synthetic peptide
  N-term Ac
  MOD_RES (4)..(4): Alpha-Me R-azide 1,4 triazole (6 carbon) alanine olefin amino acid connected by an all-carbon crosslinker comprising one double bond
  misc_feature (4)..(11): Crosslink between residues
  MOD_RES (11)..(11): Alpha-Me alkyne 1,4 triazole (5 carbon) alanine olefin amino acid connected by an all-carbon crosslinker comprising one double bond
  MOD_RES (15)..(15): D-amino acid
  C-term NH2
LTFAAYWAALAAAIV

SEQ ID NO: 1639 - protein, 15 aa, Artificial Sequence
  Description of Artificial Sequence: Synthetic peptide
  N-term Ac
  MOD_RES (4)..(4): Alpha-Me R-azide 1,4 triazole (6 carbon) alanine olefin amino acid connected by an all-carbon crosslinker comprising one double bond
  misc_feature (4)..(11): Crosslink between residues
  MOD_RES (11)..(11): Alpha-Me alkyne 1,4 triazole (5 carbon) alanine olefin amino acid connected by an all-carbon crosslinker comprising one double bond
  MOD_RES (15)..(15): D-amino acid
  C-term NH2
LTFAAYWAQLAAAMV

SEQ ID NO: 1640 - protein, 15 aa, Artificial Sequence
  Description of Artificial Sequence: Synthetic peptide
  N-term Ac
  MOD_RES (4)..(4): Alpha-Me R-azide 1,4 triazole (6 carbon) alanine olefin amino acid connected by an all-carbon crosslinker comprising one double bond
  misc_feature (4)..(11): Crosslink between residues
  MOD_RES (11)..(11): Alpha-Me alkyne 1,4 triazole (5 carbon) alanine olefin amino acid connected by an all-carbon crosslinker comprising one double bond
  MOD_RES (14)..(14): Norleucine
  MOD_RES (15)..(15): D-amino acid
  C-term NH2
LTFAAYWAALAAALV

SEQ ID NO: 1641 - protein, 15 aa, Artificial Sequence
  Description of Artificial Sequence: Synthetic peptide
  N-term Ac
  MOD_RES (4)..(4): Alpha-Me R-azide 1,4 triazole (6 carbon) alanine olefin amino acid connected by an all-carbon crosslinker comprising one double bond
  misc_feature (4)..(11): Crosslink between residues
  MOD_RES (11)..(11): Alpha-Me alkyne 1,4 triazole (5 carbon) alanine olefin amino acid connected by an all-carbon crosslinker comprising one double bond
  MOD_RES (14)..(14): Norleucine
  MOD_RES (15)..(15): D-amino acid
  C-term NH2
LTFAAYWAALAAALV

SEQ ID NO: 1642 - protein, 15 aa, Artificial Sequence
  Description of Artificial Sequence: Synthetic peptide
  N-term Ac
  MOD_RES (4)..(4): Alpha-Me R-azide 1,4 triazole (6 carbon) alanine olefin amino acid connected by an all-carbon crosslinker comprising one double bond
  misc_feature (4)..(11): Crosslink between residues
  MOD_RES (11)..(11): Alpha-Me alkyne 1,4 triazole (5 carbon) alanine olefin amino acid connected by an all-carbon crosslinker comprising one double bond
  MOD_RES (15)..(15): D-amino acid
  C-term NH2
LTFAAYWAQLAAAIL

SEQ ID NO: 1643 - protein, 15 aa, Artificial Sequence
  Description of Artificial Sequence: Synthetic peptide
  N-term Ac
  MOD_RES (4)..(4): Alpha-Me R-azide 1,4 triazole (6 carbon) alanine olefin amino acid connected by an all-carbon crosslinker comprising one double bond
  misc_feature (4)..(11): Crosslink between residues
  MOD_RES (11)..(11): Alpha-Me alkyne 1,4 triazole (5 carbon) alanine olefin amino acid connected by an all-carbon crosslinker comprising one double bond
  MOD_RES (15)..(15): D-amino acid
  C-term NH2
LTFAAYWAQLAAAIL

SEQ ID NO: 1644 - protein, 15 aa, Artificial Sequence
  Description of Artificial Sequence: Synthetic peptide
  N-term Ac
  MOD_RES (4)..(4): Alpha-Me R-azide 1,4 triazole (6 carbon) alanine olefin amino acid connected by an all-carbon crosslinker comprising one double bond
  misc_feature (4)..(11): Crosslink between residues
  MOD_RES (11)..(11): Alpha-Me alkyne 1,4 triazole (5 carbon) alanine olefin amino acid connected by an all-carbon crosslinker comprising one double bond
  MOD_RES (15)..(15): D-amino acid
  C-term NH2
LTFAAYWAALAAAML

SEQ ID NO: 1645 - protein, 15 aa, Artificial Sequence
  Description of Artificial Sequence: Synthetic peptide
  N-term Ac
  MOD_RES (4)..(4): Alpha-Me R-azide 1,4 triazole (6 carbon) alanine olefin amino acid connected by an all-carbon crosslinker comprising one double bond
  misc_feature (4)..(11): Crosslink between residues
  MOD_RES (11)..(11): Alpha-Me alkyne 1,4 triazole (5 carbon) alanine olefin amino acid connected by an all-carbon crosslinker comprising one double bond
  MOD_RES (14)..(14): Norleucine
  MOD_RES (15)..(15): D-amino acid
  C-term NH2
LTFAAYWAQLAAALL

SEQ ID NO: 1646 - protein, 15 aa, Artificial Sequence
  Description of Artificial Sequence: Synthetic peptide
  N-term Ac
  MOD_RES (4)..(4): Alpha-Me R-azide 1,4 triazole (6 carbon) alanine olefin amino acid connected by an all-carbon crosslinker comprising one double bond
  misc_feature (4)..(11): Crosslink between residues
  MOD_RES (11)..(11): Alpha-Me alkyne 1,4 triazole (5 carbon) alanine olefin amino acid connected by an all-carbon crosslinker comprising one double bond
  MOD_RES (14)..(14): Norleucine
  MOD_RES (15)..(15): D-amino acid
  C-term NH2
LTFAAYWAQLAAALL

SEQ ID NO: 1647 - protein, 13 aa, Artificial Sequence
  Description of Artificial Sequence: Synthetic peptide
  N-term Ac
  MOD_RES (2)..(2): Alpha-Me R-azide 1,4 triazole (6 carbon) alanine olefin amino acid connected by an all-carbon crosslinker comprising one double bond
  misc_feature (2)..(9): Crosslink between residues
  MOD_RES (9)..(9): Alpha-Me alkyne 1,4 triazole (5 carbon) alanine olefin amino acid connected by an all-carbon crosslinker comprising one double bond
  C-term NH2
FAAYWEALAAAMA

SEQ ID NO: 1648 - protein, 13 aa, Artificial Sequence
  Description of Artificial Sequence: Synthetic peptide
  N-term Ac
  MOD_RES (2)..(2): Alpha-Me R-azide 1,4 triazole (6 carbon) alanine olefin amino acid connected by an all-carbon crosslinker comprising one double bond
  misc_feature (2)..(9): Crosslink between residues
  MOD_RES (9)..(9): Alpha-Me alkyne 1,4 triazole (5 carbon) alanine olefin amino acid connected by an all-carbon crosslinker comprising one double bond
  MOD_RES (12)..(12): Norleucine
  C-term NH2
FAAYWEALAAALA

SEQ ID NO: 1649 - protein, 13 aa, Artificial Sequence
  Description of Artificial Sequence: Synthetic peptide
  N-term Ac
  MOD_RES (2)..(2): Alpha-Me R-azide 1,4 triazole (6 carbon) alanine olefin amino acid connected by an all-carbon crosslinker comprising one double bond
  misc_feature (2)..(9): Crosslink between residues
  MOD_RES (9)..(9): Alpha-Me alkyne 1,4 triazole (5 carbon) alanine olefin amino acid connected by an all-carbon crosslinker comprising one double bond
  MOD_RES (13)..(13): D-amino acid
  C-term NH2
FAAYWEALAAAIA

SEQ ID NO: 1650 - protein, 13 aa, Artificial Sequence
  Description of Artificial Sequence: Synthetic peptide
  N-term Ac
  MOD_RES (2)..(2): Alpha-Me R-azide 1,4 triazole (6 carbon) alanine olefin amino acid connected by an all-carbon crosslinker comprising one double bond
  misc_feature (2)..(9): Crosslink between residues
  MOD_RES (9)..(9): Alpha-Me alkyne 1,4 triazole (5 carbon) alanine olefin amino acid connected by an all-carbon crosslinker comprising one double bond
  MOD_RES (13)..(13): D-amino acid
  C-term NH2
FAAYWEALAAAMA

SEQ ID NO: 1651 - protein, 13 aa, Artificial Sequence
  Description of Artificial Sequence: Synthetic peptide
  N-term Ac
  MOD_RES (2)..(2): Alpha-Me R-azide 1,4 triazole (6 carbon) alanine olefin amino acid connected by an all-carbon crosslinker comprising one double bond
  misc_feature (2)..(9): Crosslink between residues
  MOD_RES (9)..(9): Alpha-Me alkyne 1,4 triazole (5 carbon) alanine olefin amino acid connected by an all-carbon crosslinker comprising one double bond
  MOD_RES (12)..(12): Norleucine
  MOD_RES (13)..(13): D-amino acid
  C-term NH2
FAAYWEALAAALA

SEQ ID NO: 1652 - protein, 13 aa, Artificial Sequence
  Description of Artificial Sequence: Synthetic peptide
  N-term Ac
  MOD_RES (2)..(2): Alpha-Me R-azide 1,4 triazole (6 carbon) alanine olefin amino acid connected by an all-carbon crosslinker comprising one double bond
  misc_feature (2)..(9): Crosslink between residues
  MOD_RES (9)..(9): Alpha-Me alkyne 1,4 triazole (5 carbon) alanine olefin amino acid connected by an all-carbon crosslinker comprising one double bond
  MOD_RES (13)..(13): D-amino acid
  C-term NH2
FAAYWEALAAAIV

SEQ ID NO: 1653 - protein, 13 aa, Artificial Sequence
  Description of Artificial Sequence: Synthetic peptide
  N-term Ac
  MOD_RES (2)..(2): Alpha-Me R-azide 1,4 triazole (6 carbon) alanine olefin amino acid connected by an all-carbon crosslinker comprising one double bond
  misc_feature (2)..(9): Crosslink between residues
  MOD_RES (9)..(9): Alpha-Me alkyne 1,4 triazole (5 carbon) alanine olefin amino acid connected by an all-carbon crosslinker comprising one double bond
  MOD_RES (13)..(13): D-amino acid
  C-term NH2
FAAYWEALAAAMV

SEQ ID NO: 1654 - protein, 13 aa, Artificial Sequence
  Description of Artificial Sequence: Synthetic peptide
  N-term Ac
  MOD_RES (2)..(2): Alpha-Me R-azide 1,4 triazole (6 carbon) alanine olefin amino acid connected by an all-carbon crosslinker comprising one double bond
  misc_feature (2)..(9): Crosslink between residues
  MOD_RES (9)..(9): Alpha-Me alkyne 1,4 triazole (5 carbon) alanine olefin amino acid connected by an all-carbon crosslinker comprising one double bond
  MOD_RES (12)..(12): Norleucine
  MOD_RES (13)..(13): D-amino acid
  C-term NH2
FAAYWEALAAALV

SEQ ID NO: 1655 - protein, 13 aa, Artificial Sequence
  Description of Artificial Sequence: Synthetic peptide
  N-term Ac
  MOD_RES (2)..(2): Alpha-Me R-azide 1,4 triazole (6 carbon) alanine olefin amino acid connected by an all-carbon crosslinker comprising one double bond
  misc_feature (2)..(9): Crosslink between residues
  MOD_RES (9)..(9): Alpha-Me alkyne 1,4 triazole (5 carbon) alanine olefin amino acid connected by an all-carbon crosslinker comprising one double bond
  MOD_RES (13)..(13): D-amino acid
  C-term NH2
FAAYWEALAAAIL

SEQ ID NO: 1656 - protein, 13 aa, Artificial Sequence
  Description of Artificial Sequence: Synthetic peptide
  N-term Ac
  MOD_RES (2)..(2): Alpha-Me R-azide 1,4 triazole (6 carbon) alanine olefin amino acid connected by an all-carbon crosslinker comprising one double bond
  misc_feature (2)..(9): Crosslink between residues
  MOD_RES (9)..(9): Alpha-Me alkyne 1,4 triazole (5 carbon) alanine olefin amino acid connected by an all-carbon crosslinker comprising one double bond
  MOD_RES (13)..(13): D-amino acid
  C-term NH2
FAAYWEALAAAML

SEQ ID NO: 1657 - protein, 13 aa, Artificial Sequence
  Description of Artificial Sequence: Synthetic peptide
  N-term Ac
  MOD_RES (2)..(2): Alpha-Me R-azide 1,4 triazole (6 carbon) alanine olefin amino acid connected by an all-carbon crosslinker comprising one double bond
  misc_feature (2)..(9): Crosslink between residues
  MOD_RES (9)..(9): Alpha-Me alkyne 1,4 triazole (5 carbon) alanine olefin amino acid connected by an all-carbon crosslinker comprising one double bond
  MOD_RES (12)..(12): Norleucine
  MOD_RES (13)..(13): D-amino acid
  C-term NH2
FAAYWEALAAALL

SEQ ID NO: 1658 - protein, 13 aa, Artificial Sequence
  Description of Artificial Sequence: Synthetic peptide
  N-term Ac
  MOD_RES (2)..(2): Alpha-Me R-azide 1,4 triazole (6 carbon) alanine olefin amino acid connected by an all-carbon crosslinker comprising one double bond
  misc_feature (2)..(9): Crosslink between residues
  MOD_RES (9)..(9): Alpha-Me alkyne 1,4 triazole (5 carbon) alanine olefin amino acid connected by an all-carbon crosslinker comprising one double bond
  MOD_RES (12)..(12): Norleucine
  MOD_RES (13)..(13): D-amino acid
  C-term NH2
FAAYWEALAAALL

SEQ ID NO: 1659 - protein, 14 aa, Artificial Sequence
  Description of Artificial Sequence: Synthetic peptide
  N-term Ac
  MOD_RES (4)..(4): Alpha-Me R-azide 1,4 triazole (6 carbon) alanine olefin amino acid connected by an all-carbon crosslinker comprising one double bond
  misc_feature (4)..(11): Crosslink between residues
  MOD_RES (7)..(7): 6cl-Trp
  MOD_RES (11)..(11): Alpha-Me alkyne 1,4 triazole (5 carbon) alanine olefin amino acid connected by an all-carbon crosslinker comprising one double bond
  C-term NH2
LTFAAYWAQLASAA

SEQ ID NO: 1660 - protein, 14 aa, Artificial Sequence
  Description of Artificial Sequence: Synthetic peptide
  N-term Ac
  MOD_RES (4)..(4): Alpha-Me R-azide 1,4 triazole (6 carbon) alanine olefin amino acid connected by an all-carbon crosslinker comprising one double bond
  misc_feature (4)..(11): Crosslink between residues
  MOD_RES (7)..(7): 6cl-Trp
  MOD_RES (11)..(11): Alpha-Me alkyne 1,4 triazole (5 carbon) alanine olefin amino acid connected by an all-carbon crosslinker comprising one double bond
  C-term NH2
LTFAAYWAQLASAA

SEQ ID NO: 1661 - protein, 15 aa, Artificial Sequence
  Description of Artificial Sequence: Synthetic peptide
  N-term Ac
  MOD_RES (4)..(4): Alpha-Me R-azide 1,4 triazole (6 carbon) alanine olefin amino acid connected by an all-carbon crosslinker comprising one double bond
  misc_feature (4)..(11): Crosslink between residues
  MOD_RES (11)..(11): Alpha-Me alkyne 1,4 triazole (5 carbon) alanine olefin amino acid connected by an all-carbon crosslinker comprising one double bond
  MOD_RES (15)..(15): D-amino acid
  C-term NH2
WTFAFYWSQLAAVAA

SEQ ID NO: 1662 - protein, 15 aa, Artificial Sequence
  Description of Artificial Sequence: Synthetic peptide
  N-term Ac
  MOD_RES (4)..(4): Alpha-Me R-azide 1,4 triazole (6 carbon) alanine olefin amino acid connected by an all-carbon crosslinker comprising one double bond
  misc_feature (4)..(11): Crosslink between residues
  MOD_RES (11)..(11): Alpha-Me alkyne 1,4 triazole (5 carbon) alanine olefin amino acid connected by an all-carbon crosslinker comprising one double bond
  MOD_RES (15)..(15): D-amino acid
  C-term NH2
WTFAFYWSQLAAVAA

SEQ ID NO: 1663 - protein, 14 aa, Artificial Sequence
  Description of Artificial Sequence: Synthetic peptide
  N-term Ac
  MOD_RES (4)..(4): Alpha-Me R-azide 1,4 triazole (6 carbon) alanine olefin amino acid connected by an all-carbon crosslinker comprising one double bond
  misc_feature (4)..(11): Crosslink between residues
  MOD_RES (11)..(11): Alpha-Me alkyne 1,4 triazole (5 carbon) alanine olefin amino acid connected by an all-carbon crosslinker comprising one double bond
  C-term NH2
WTFAVYWSQLAAVA

SEQ ID NO: 1664 - protein, 14 aa, Artificial Sequence
  Description of Artificial Sequence: Synthetic peptide
  N-term Ac
  MOD_RES (4)..(4): Alpha-Me R-azide 1,4 triazole (6 carbon) alanine olefin amino acid connected by an all-carbon crosslinker comprising one double bond
  misc_feature (4)..(11): Crosslink between residues
  MOD_RES (11)..(11): Alpha-Me alkyne 1,4 triazole (5 carbon) alanine olefin amino acid connected by an all-carbon crosslinker comprising one double bond
  C-term NH2
WTFAVYWSQLAAVA

SEQ ID NO: 1665 - protein, 15 aa, Artificial Sequence
  Description of Artificial Sequence: Synthetic peptide
  N-term Ac
  MOD_RES (4)..(4): Alpha-Me R-azide 1,4 triazole (6 carbon) alanine olefin amino acid connected by an all-carbon crosslinker comprising one double bond
  misc_feature (4)..(11): Crosslink between residues
  MOD_RES (11)..(11): Alpha-Me alkyne 1,4 triazole (5 carbon) alanine olefin amino acid connected by an all-carbon crosslinker comprising one double bond
  MOD_RES (15)..(15): D-amino acid
  C-term NH2
WTFAFYWSQLASAAA

SEQ ID NO: 1666 - protein, 15 aa, Artificial Sequence
  Description of Artificial Sequence: Synthetic peptide
  N-term Ac
  MOD_RES (4)..(4): Alpha-Me R-azide 1,4 triazole (6 carbon) alanine olefin amino acid connected by an all-carbon crosslinker comprising one double bond
  misc_feature (4)..(11): Crosslink between residues
  MOD_RES (11)..(11): Alpha-Me alkyne 1,4 triazole (5 carbon) alanine olefin amino acid connected by an all-carbon crosslinker comprising one double bond
  MOD_RES (15)..(15): D-amino acid
  C-term NH2
WTFAFYWSQLASAAA

SEQ ID NO: 1667 - protein, 16 aa, Artificial Sequence
  Description of Artificial Sequence: Synthetic peptide
  N-term Ac
  MOD_RES (4)..(4): Alpha-Me R-azide 1,4 triazole (6 carbon) alanine olefin amino acid connected by an all-carbon crosslinker comprising one double bond
  misc_feature (4)..(11): Crosslink between residues
  MOD_RES (11)..(11): Alpha-Me alkyne 1,4 triazole (5 carbon) alanine olefin amino acid connected by an all-carbon crosslinker comprising one double bond
  MOD_RES (15)..(16): D-amino acid
  C-term NH2
WTFAVYWSQLAAVAAA

SEQ ID NO: 1668 - protein, 16 aa, Artificial Sequence
  Description of Artificial Sequence: Synthetic peptide
  N-term Ac
  MOD_RES (4)..(4): Alpha-Me R-azide 1,4 triazole (6 carbon) alanine olefin amino acid connected by an all-carbon crosslinker comprising one double bond
  misc_feature (4)..(11): Crosslink between residues
  MOD_RES (11)..(11): Alpha-Me alkyne 1,4 triazole (5 carbon) alanine olefin amino acid connected by an all-carbon crosslinker comprising one double bond
  MOD_RES (15)..(16): D-amino acid
  C-term NH2
WTFAVYWSQLAAVAAA

SEQ ID NO: 1669 - protein, 14 aa, Artificial Sequence
  Description of Artificial Sequence: Synthetic peptide
  N-term Ac
  MOD_RES (4)..(4): Alpha-Me R-azide 1,4 triazole (6 carbon) alanine olefin amino acid connected by an all-carbon crosslinker comprising one double bond
  misc_feature (4)..(11): Crosslink between residues
  MOD_RES (11)..(11): Alpha-Me alkyne 1,4 triazole (5 carbon) alanine olefin amino acid connected by an all-carbon crosslinker comprising one double bond
  C-term NH2
LTFAAYWAQLAAVG

SEQ ID NO: 1670 - protein, 14 aa, Artificial Sequence
  Description of Artificial Sequence: Synthetic peptide
  N-term Ac
  MOD_RES (4)..(4): Alpha-Me R-azide 1,4 triazole (6 carbon) alanine olefin amino acid connected by an all-carbon crosslinker comprising one double bond
  misc_feature (4)..(11): Crosslink between residues
  MOD_RES (11)..(11): Alpha-Me alkyne 1,4 triazole (5 carbon) alanine olefin amino acid connected by an all-carbon crosslinker comprising one double bond
  C-term NH2
LTFAAYWAQLAAVG

SEQ ID NO: 1671 - protein, 14 aa, Artificial Sequence
  Description of Artificial Sequence: Synthetic peptide
  N-term Ac
  MOD_RES (4)..(4): Alpha-Me R-azide 1,4 triazole (6 carbon) alanine olefin amino acid connected by an all-carbon crosslinker comprising one double bond
  misc_feature (4)..(11): Crosslink between residues
  MOD_RES (11)..(11): Alpha-Me alkyne 1,4 triazole (5 carbon) alanine olefin amino acid connected by an all-carbon crosslinker comprising one double bond
  C-term NH2
LTFAAYWAQLAAVQ

SEQ ID NO: 1672 - protein, 14 aa, Artificial Sequence
  Description of Artificial Sequence: Synthetic peptide
  N-term Ac
  MOD_RES (4)..(4): Alpha-Me R-azide 1,4 triazole (6 carbon) alanine olefin amino acid connected by an all-carbon crosslinker comprising one double bond
  misc_feature (4)..(11): Crosslink between residues
  MOD_RES (11)..(11): Alpha-Me alkyne 1,4 triazole (5 carbon) alanine olefin amino acid connected by an all-carbon crosslinker comprising one double bond
  C-term NH2
LTFAAYWAQLAAVQ

SEQ ID NO: 1673 - protein, 14 aa, Artificial Sequence
  Description of Artificial Sequence: Synthetic peptide
  N-term Ac
  MOD_RES (4)..(4): Alpha-Me R-azide 1,4 triazole (6 carbon) alanine olefin amino acid connected by an all-carbon crosslinker comprising one double bond
  misc_feature (4)..(11): Crosslink between residues
  MOD_RES (11)..(11): Alpha-Me alkyne 1,4 triazole (5 carbon) alanine olefin amino acid connected by an all-carbon crosslinker comprising one double bond
  MOD_RES (14)..(14): D-amino acid
  C-term NH2
LTFAAYWAQLASAA

SEQ ID NO: 1674 - protein, 14 aa, Artificial Sequence
  Description of Artificial Sequence: Synthetic peptide
  N-term Ac
  MOD_RES (4)..(4): Alpha-Me R-azide 1,4 triazole (6 carbon) alanine olefin amino acid connected by an all-carbon crosslinker comprising one double bond
  misc_feature (4)..(11): Crosslink between residues
  MOD_RES (11)..(11): Alpha-Me alkyne 1,4 triazole (5 carbon) alanine olefin amino acid connected by an all-carbon crosslinker comprising one double bond
  MOD_RES (14)..(14): D-amino acid
  C-term NH2
LTFAAYWAQLASAA

SEQ ID NO: 1675 - protein, 14 aa, Artificial Sequence
  Description of Artificial Sequence: Synthetic peptide
  N-term Ac
  MOD_RES (4)..(4): Alpha-Me R-azide 1,4 triazole (6 carbon) alanine olefin amino acid connected by an all-carbon crosslinker comprising one double bond
  misc_feature (4)..(11): Crosslink between residues
  MOD_RES (10)..(10): homo-Leu
  MOD_RES (11)..(11): Alpha-Me alkyne 1,4 triazole (5 carbon) alanine olefin amino acid connected by an all-carbon crosslinker comprising one double bond
  C-term NH2
LTFAAYWAQLASAA

SEQ ID NO: 1676 - protein, 14 aa, Artificial Sequence
  Description of Artificial Sequence: Synthetic peptide
  N-term Ac
  MOD_RES (4)..(4): Alpha-Me R-azide 1,4 triazole (6 carbon) alanine olefin amino acid connected by an all-carbon crosslinker comprising one double bond
  misc_feature (4)..(11): Crosslink between residues
  MOD_RES (10)..(10): homo-Leu
  MOD_RES (11)..(11): Alpha-Me alkyne 1,4 triazole (5 carbon) alanine olefin amino acid connected by an all-carbon crosslinker comprising one double bond
  C-term NH2
LTFAAYWAQLASAA

SEQ ID NO: 1677 - protein, 14 aa, Artificial Sequence
  Description of Artificial Sequence: Synthetic peptide
  N-term Ac
  MOD_RES (4)..(4): Alpha-Me R-azide 1,4 triazole (6 carbon) alanine olefin amino acid connected by an all-carbon crosslinker comprising one double bond
  misc_feature (4)..(11): Crosslink between residues
  MOD_RES (11)..(11): Amino acid comprising two pentenyl-alanine olefin side chains, each of which is crosslinked to another amino acid as indicated
  misc_feature (11)..(14): Crosslink between residues
  MOD_RES (14)..(14): Alpha-Me alkyne 1,4 triazole (5 carbon) alanine olefin amino acid connected by an all-carbon crosslinker comprising one double bond
  C-term NH2
LTFAAYWEQLASAA

SEQ ID NO: 1678 - protein, 14 aa, Artificial Sequence
  Description of Artificial Sequence: Synthetic peptide
  N-term Ac
  MOD_RES (4)..(4): Alpha-Me R-azide 1,4 triazole (6 carbon) alanine olefin amino acid connected by an all-carbon crosslinker comprising one double bond
  misc_feature (4)..(11): Crosslink between residues
  MOD_RES (11)..(11): Alpha-Me alkyne 1,4 triazole (5 carbon) alanine olefin amino acid connected by an all-carbon crosslinker comprising one double bond
  C-term NH2
LTFAAYWAQLASLA

SEQ ID NO: 1679 - protein, 14 aa, Artificial Sequence
  Description of Artificial Sequence: Synthetic peptide
  N-term Ac
  MOD_RES (4)..(4): Alpha-Me R-azide 1,4 triazole (6 carbon) alanine olefin amino acid connected by an all-carbon crosslinker comprising one double bond
  misc_feature (4)..(11): Crosslink between residues
  MOD_RES (11)..(11): Alpha-Me alkyne 1,4 triazole (5 carbon) alanine olefin amino acid connected by an all-carbon crosslinker comprising one double bond
  C-term NH2
LTFAAYWAQLASLA

SEQ ID NO: 1680 - protein, 14 aa, Artificial Sequence
  Description of Artificial Sequence: Synthetic peptide
  N-term Ac
  MOD_RES (4)..(4): Alpha-Me R-azide 1,4 triazole (6 carbon) alanine olefin amino acid connected by an all-carbon crosslinker comprising one double bond
  misc_feature (4)..(11): Crosslink between residues
  MOD_RES (11)..(11): Alpha-Me alkyne 1,4 triazole (5 carbon) alanine olefin amino acid connected by an all-carbon crosslinker comprising one double bond
  C-term NH2
LTFAAYWAQLASWA

SEQ ID NO: 1681 - protein, 14 aa, Artificial Sequence
  Description of Artificial Sequence: Synthetic peptide
  N-term Ac
  MOD_RES (4)..(4): Alpha-Me R-azide 1,4 triazole (6 carbon) alanine olefin amino acid connected by an all-carbon crosslinker comprising one double bond
  misc_feature (4)..(11): Crosslink between residues
  MOD_RES (11)..(11): Alpha-Me alkyne 1,4 triazole (5 carbon) alanine olefin amino acid connected by an all-carbon crosslinker comprising one double bond
  C-term NH2
LTFAAYWAQLASWA

SEQ ID NO: 1682 - protein, 14 aa, Artificial Sequence
  Description of Artificial Sequence: Synthetic peptide
  N-term Ac
  MOD_RES (4)..(4): Alpha-Me R-azide 1,4 triazole (6 carbon) alanine olefin amino acid connected by an all-carbon crosslinker comprising one double bond
  misc_feature (4)..(11): Crosslink between residues
  MOD_RES (11)..(11): Alpha-Me alkyne 1,4 triazole (5 carbon) alanine olefin amino acid connected by an all-carbon crosslinker comprising one double bond
  C-term NH2
LTFAAYWAQLASVS

SEQ ID NO: 1683 - protein, 14 aa, Artificial Sequence
  Description of Artificial Sequence: Synthetic peptide
  N-term Ac
  MOD_RES (4)..(4): Alpha-Me R-azide 1,4 triazole (6 carbon) alanine olefin amino acid connected by an all-carbon crosslinker comprising one double bond
  misc_feature (4)..(11): Crosslink between residues
  MOD_RES (11)..(11): Alpha-Me alkyne 1,4 triazole (5 carbon) alanine olefin amino acid connected by an all-carbon crosslinker comprising one double bond
  C-term NH2
LTFAAYWAQLASAS

SEQ ID NO: 1684 - protein, 14 aa, Artificial Sequence
  Description of Artificial Sequence: Synthetic peptide
  N-term Ac
  MOD_RES (4)..(4): Alpha-Me R-azide 1,4 triazole (6 carbon) alanine olefin amino acid connected by an all-carbon crosslinker comprising one double bond
  misc_feature (4)..(11): Crosslink between residues
  MOD_RES (11)..(11): Alpha-Me alkyne 1,4 triazole (5 carbon) alanine olefin amino acid connected by an all-carbon crosslinker comprising one double bond
  C-term NH2
LTFAAYWAQLASVG

SEQ ID NO: 1685 - protein, 14 aa, Artificial Sequence
  Description of Artificial Sequence: Synthetic peptide
  N-term Ac
  MOD_RES (4)..(4): Alpha-Me R-azide 1,4 triazole (6 carbon) alanine olefin amino acid connected by an all-carbon crosslinker comprising one double bond
  misc_feature (4)..(11): Crosslink between residues
  MOD_RES (11)..(11): Alpha-Me alkyne 1,4 triazole (5 carbon) alanine olefin amino acid connected by an all-carbon crosslinker comprising one double bond
  MOD_RES (14)..(14): D-amino acid
  C-term NH2
ETFAVYWAQLASAA

SEQ ID NO: 1686 - protein, 14 aa, Artificial Sequence
  Description of Artificial Sequence: Synthetic peptide
  N-term Ac
  MOD_RES (4)..(4): Alpha-Me R-azide 1,4 triazole (6 carbon) alanine olefin amino acid connected by an all-carbon crosslinker comprising one double bond
  misc_feature (4)..(11): Crosslink between residues
  MOD_RES (11)..(11): Alpha-Me alkyne 1,4 triazole (5 carbon) alanine olefin amino acid connected by an all-carbon crosslinker comprising one double bond
  C-term NH2
ETFAVYWAQLASAA

SEQ ID NO: 1687 - protein, 14 aa, Artificial Sequence
  Description of Artificial Sequence: Synthetic peptide
  N-term Ac
  MOD_RES (4)..(4): Alpha-Me R-azide 1,4 triazole (6 carbon) alanine olefin amino acid connected by an all-carbon crosslinker comprising one double bond
  misc_feature (4)..(11): Crosslink between residues
  MOD_RES (11)..(11): Alpha-Me alkyne 1,4 triazole (5 carbon) alanine olefin amino acid connected by an all-carbon crosslinker comprising one double bond
  C-term NH2
ETFAVYWAQLASVA

SEQ ID NO: 1688 - protein, 14 aa, Artificial Sequence
  Description of Artificial Sequence: Synthetic peptide
  N-term Ac
  MOD_RES (4)..(4): Alpha-Me R-azide 1,4 triazole (6 carbon) alanine olefin amino acid connected by an all-carbon crosslinker comprising one double bond
  misc_feature (4)..(11): Crosslink between residues
  MOD_RES (11)..(11): Alpha-Me alkyne 1,4 triazole (5 carbon) alanine olefin amino acid connected by an all-carbon crosslinker comprising one double bond
  C-term NH2
ETFAVYWAQLASLA

SEQ ID NO: 1689 - protein, 14 aa, Artificial Sequence
  Description of Artificial Sequence: Synthetic peptide
  N-term Ac
  MOD_RES (4)..(4): Alpha-Me R-azide 1,4 triazole (6 carbon) alanine olefin amino acid connected by an all-carbon crosslinker comprising one double bond
  misc_feature (4)..(11): Crosslink between residues
  MOD_RES (11)..(11): Alpha-Me alkyne 1,4 triazole (5 carbon) alanine olefin amino acid connected by an all-carbon crosslinker comprising one double bond
  C-term NH2
ETFAVYWAQLASWA

SEQ ID NO: 1690 - protein, 14 aa, Artificial Sequence
  Description of Artificial Sequence: Synthetic peptide
  N-term Ac
  MOD_RES (4)..(4): Alpha-Me R-azide 1,4 triazole (6 carbon) alanine olefin amino acid connected by an all-carbon crosslinker comprising one double bond
  misc_feature (4)..(11): Crosslink between residues
  MOD_RES (11)..(11): Alpha-Me alkyne 1,4 triazole (5 carbon) alanine olefin amino acid connected by an all-carbon crosslinker comprising one double bond
  C-term NH2
ETFAKYWAQLASWA

SEQ ID NO: 1691 - protein, 14 aa, Artificial Sequence
  Description of Artificial Sequence: Synthetic peptide
  N-term Ac
  MOD_RES (4)..(4): Alpha-Me R-azide 1,4 triazole (6 carbon) alanine olefin amino acid connected by an all-carbon crosslinker comprising one double bond
  misc_feature (4)..(11): Crosslink between residues
  MOD_RES (11)..(11): Alpha-Me alkyne 1,4 triazole (5 carbon) alanine olefin amino acid connected by an all-carbon crosslinker comprising one double bond
  C-term NH2
ETFAVYWAQLASVS

SEQ ID NO: 1692 - protein, 14 aa, Artificial Sequence
  Description of Artificial Sequence: Synthetic peptide
  N-term Ac
  MOD_RES (4)..(4): Alpha-Me R-azide 1,4 triazole (6 carbon) alanine olefin amino acid connected by an all-carbon crosslinker comprising one double bond
  misc_feature (4)..(11): Crosslink between residues
  MOD_RES (11)..(11): Alpha-Me alkyne 1,4 triazole (5 carbon) alanine olefin amino acid connected by an all-carbon crosslinker comprising one double bond
  C-term NH2
ETFAVYWAQLASAS

SEQ ID NO: 1693 - protein, 14 aa, Artificial Sequence
  Description of Artificial Sequence: Synthetic peptide
  N-term Ac
  MOD_RES (4)..(4): Alpha-Me R-azide 1,4 triazole (6 carbon) alanine olefin amino acid connected by an all-carbon crosslinker comprising one double bond
  misc_feature (4)..(11): Crosslink between residues
  MOD_RES (11)..(11): Alpha-Me alkyne 1,4 triazole (5 carbon) alanine olefin amino acid connected by an all-carbon crosslinker comprising one double bond
  C-term NH2
ETFAVYWAQLASVG

SEQ ID NO: 1694 - protein, 14 aa, Artificial Sequence
  Description of Artificial Sequence: Synthetic peptide
  N-term Ac
  MOD_RES (4)..(4): Alpha-Me R-azide 1,4 triazole (6 carbon) alanine olefin amino acid connected by an all-carbon crosslinker comprising one double bond
  misc_feature (4)..(11): Crosslink between residues
  MOD_RES (11)..(11): Alpha-Me alkyne 1,4 triazole (5 carbon) alanine olefin amino acid connected by an all-carbon crosslinker comprising one double bond
  MOD_RES (14)..(14): D-amino acid
  C-term NH2
LTFAVYWAQLASSA

SEQ ID NO: 1695 - protein, 14 aa, Artificial Sequence
  Description of Artificial Sequence: Synthetic peptide
  N-term Ac
  MOD_RES (4)..(4): Alpha-Me R-azide 1,4 triazole (6 carbon) alanine olefin amino acid connected by an all-carbon crosslinker comprising one double bond
  misc_feature (4)..(11): Crosslink between residues
  MOD_RES (11)..(11): Alpha-Me alkyne 1,4 triazole (5 carbon) alanine olefin amino acid connected by an all-carbon crosslinker comprising one double bond
  MOD_RES (14)..(14): D-amino acid
  C-term NH2
ETFAVYWAQLASSA

SEQ ID NO: 1696 - protein, 14 aa, Artificial Sequence
  Description of Artificial Sequence: Synthetic peptide
  N-term Ac
  MOD_RES (4)..(4): Alpha-Me R-azide 1,4 triazole (6 carbon) alanine olefin amino acid connected by an all-carbon crosslinker comprising one double bond
  misc_feature (4)..(11): Crosslink between residues
  MOD_RES (11)..(11): Alpha-Me alkyne 1,4 triazole (5 carbon) alanine olefin amino acid connected by an all-carbon crosslinker comprising one double bond
  MOD_RES (14)..(14): D-amino acid
  C-term NH2
LTFAVYWAQLASNA

SEQ ID NO: 1697 - protein, 14 aa, Artificial Sequence
  Description of Artificial Sequence: Synthetic peptide
  N-term Ac
  MOD_RES (4)..(4): Alpha-Me R-azide 1,4 triazole (6 carbon) alanine olefin amino acid connected by an all-carbon crosslinker comprising one double bond
  misc_feature (4)..(11): Crosslink between residues
  MOD_RES (11)..(11): Alpha-Me alkyne 1,4 triazole (5 carbon) alanine olefin amino acid connected by an all-carbon crosslinker comprising one double bond
  MOD_RES (14)..(14): D-amino acid
  C-term NH2
ETFAVYWAQLASNA

SEQ ID NO: 1698 - protein, 14 aa, Artificial Sequence
  Description of Artificial Sequence: Synthetic peptide
  N-term Ac
  MOD_RES (4)..(4): Alpha-Me R-azide 1,4 triazole (6 carbon) alanine olefin amino acid connected by an all-carbon crosslinker comprising one double bond
  misc_feature (4)..(11): Crosslink between residues
  MOD_RES (11)..(11): Alpha-Me alkyne 1,4 triazole (5 carbon) alanine olefin amino acid connected by an all-carbon crosslinker comprising one double bond
  MOD_RES (14)..(14): D-amino acid
  C-term NH2
LTFAVYWAQLASAA

SEQ ID NO: 1699 - protein, 14 aa, Artificial Sequence
  Description of Artificial Sequence: Synthetic peptide
  N-term Ac
  MOD_RES (4)..(4): Alpha-Me R-azide 1,4 triazole (6 carbon) alanine olefin amino acid connected by an all-carbon crosslinker comprising one double bond
  misc_feature (4)..(11): Crosslink between residues
  MOD_RES (11)..(11): Alpha-Me alkyne 1,4 triazole (5 carbon) alanine olefin amino acid connected by an all-carbon crosslinker comprising one double bond
  C-term NH2
LTFAVYWAQLASVA

SEQ ID NO: 1700 - protein, 14 aa, Artificial Sequence
  Description of Artificial Sequence: Synthetic peptide
  N-term Ac
  MOD_RES (4)..(4): Alpha-Me R-azide 1,4 triazole (6 carbon) alanine olefin amino acid connected by an all-carbon crosslinker comprising one double bond
  misc_feature (4)..(11): Crosslink between residues
  MOD_RES (11)..(11): Alpha-Me alkyne 1,4 triazole (5 carbon) alanine olefin amino acid connected by an all-carbon crosslinker comprising one double bond
  C-term NH2
LTFAVYWAQLASVA

SEQ ID NO: 1701 - protein, 14 aa, Artificial Sequence
  Description of Artificial Sequence: Synthetic peptide
  N-term Ac
  MOD_RES (4)..(4): Alpha-Me R-azide 1,4 triazole (6 carbon) alanine olefin amino acid connected by an all-carbon crosslinker comprising one double bond
  misc_feature (4)..(11): Crosslink between residues
  MOD_RES (11)..(11): Alpha-Me alkyne 1,4 triazole (5 carbon) alanine olefin amino acid connected by an all-carbon crosslinker comprising one double bond
  C-term NH2
LTFAVYWAQLASWA

SEQ ID NO: 1702 - protein, 14 aa, Artificial Sequence
  Description of Artificial Sequence: Synthetic peptide
  N-term Ac
  MOD_RES (4)..(4): Alpha-Me R-azide 1,4 triazole (6 carbon) alanine olefin amino acid connected by an all-carbon crosslinker comprising one double bond
  misc_feature (4)..(11): Crosslink between residues
  MOD_RES (11)..(11): Alpha-Me alkyne 1,4 triazole (5 carbon) alanine olefin amino acid connected by an all-carbon crosslinker comprising one double bond
  C-term NH2
LTFAVYWAQLASVS

SEQ ID NO: 1703 - protein, 14 aa, Artificial Sequence
  Description of Artificial Sequence: Synthetic peptide
  N-term Ac
  MOD_RES (4)..(4): Alpha-Me R-azide 1,4 triazole (6 carbon) alanine olefin amino acid connected by an all-carbon crosslinker comprising one double bond
  misc_feature (4)..(11): Crosslink between residues
  MOD_RES (11)..(11): Alpha-Me alkyne 1,4 triazole (5 carbon) alanine olefin amino acid connected by an all-carbon crosslinker comprising one double bond
  C-term NH2
LTFAVYWAQLASVS

SEQ ID NO: 1704 - protein, 14 aa, Artificial Sequence
  Description of Artificial Sequence: Synthetic peptide
  N-term Ac
  MOD_RES (4)..(4): Alpha-Me R-azide 1,4 triazole (6 carbon) alanine olefin amino acid connected by an all-carbon crosslinker comprising one double bond
  misc_feature (4)..(11): Crosslink between residues
  MOD_RES (11)..(11): Alpha-Me alkyne 1,4 triazole (5 carbon) alanine olefin amino acid connected by an all-carbon crosslinker comprising one double bond
  C-term NH2
LTFAVYWAQLASAS

SEQ ID NO: 1705 - protein, 14 aa, Artificial Sequence
  Description of Artificial Sequence: Synthetic peptide
  N-term Ac
  MOD_RES (4)..(4): Alpha-Me R-azide 1,4 triazole (6 carbon) alanine olefin amino acid connected by an all-carbon crosslinker comprising one double bond
  misc_feature (4)..(11): Crosslink between residues
  MOD_RES (11)..(11): Alpha-Me alkyne 1,4 triazole (5 carbon) alanine olefin amino acid connected by an all-carbon crosslinker comprising one double bond
  C-term NH2
LTFAVYWAQLASAS

SEQ ID NO: 1706 - protein, 14 aa, Artificial Sequence
  Description of Artificial Sequence: Synthetic peptide
  N-term Ac
  MOD_RES (4)..(4): Alpha-Me R-azide 1,4 triazole (6 carbon) alanine olefin amino acid connected by an all-carbon crosslinker comprising one double bond
  misc_feature (4)..(11): Crosslink between residues
  MOD_RES (11)..(11): Alpha-Me alkyne 1,4 triazole (5 carbon) alanine olefin amino acid connected by an all-carbon crosslinker comprising one double bond
  C-term NH2
LTFAVYWAQLASVG

SEQ ID NO: 1707 - protein, 14 aa, Artificial Sequence
  Description of Artificial Sequence: Synthetic peptide
  N-term Ac
  MOD_RES (4)..(4): Alpha-Me R-azide 1,4 triazole (6 carbon) alanine olefin amino acid connected by an all-carbon crosslinker comprising one double bond
  misc_feature (4)..(11): Crosslink between residues
  MOD_RES (11)..(11): Alpha-Me alkyne 1,4 triazole (5 carbon) alanine olefin amino acid connected by an all-carbon crosslinker comprising one double bond
  C-term NH2
LTFAVYWAQLASVG

SEQ ID NO: 1708 - protein, 14 aa, Artificial Sequence
  Description of Artificial Sequence: Synthetic peptide
  N-term Ac
  MOD_RES (4)..(4): Alpha-Me R-azide 1,4 triazole (6 carbon) alanine olefin amino acid connected by an all-carbon crosslinker comprising one double bond
  misc_feature (4)..(11): Crosslink between residues
  MOD_RES (10)..(10): Cyclohexyl-Ala
  MOD_RES (11)..(11): Alpha-Me alkyne 1,4 triazole (5 carbon) alanine olefin amino acid connected by an all-carbon crosslinker comprising one double bond
  C-term NH2
LTFAEYWAQAASAA

SEQ ID NO: 1709 - protein, 14 aa, Artificial Sequence
  Description of Artificial Sequence: Synthetic peptide
  N-term Ac
  MOD_RES (4)..(4): Alpha-Me R-azide 1,4 triazole (6 carbon) alanine olefin amino acid connected by an all-carbon crosslinker comprising one double bond
  misc_feature (4)..(11): Crosslink between residues
  MOD_RES (10)..(10): Cyclohexyl-Ala
  MOD_RES (11)..(11): Alpha-Me alkyne 1,4 triazole (5 carbon) alanine olefin amino acid connected by an all-carbon crosslinker comprising one double bond
  C-term NH2
LTFAEYWAQAASAA

SEQ ID NO: 1710 - protein, 14 aa, Artificial Sequence
  Description of Artificial Sequence: Synthetic peptide
  N-term Ac
  MOD_RES (4)..(4): Alpha-Me R-azide 1,4 triazole (6 carbon) alanine olefin amino acid connected by an all-carbon crosslinker comprising one double bond
  misc_feature (4)..(11): Crosslink between residues
  MOD_RES (10)..(10): Cyclopentyl-Gly
  MOD_RES (11)..(11): Alpha-Me alkyne 1,4 triazole (5 carbon) alanine olefin amino acid connected by an all-carbon crosslinker comprising one double bond
  C-term NH2
LTFAEYWAQGASAA

SEQ ID NO: 1711 - protein, 14 aa, Artificial Sequence
  Description of Artificial Sequence: Synthetic peptide
  N-term Ac
  MOD_RES (4)..(4): Alpha-Me R-azide 1,4 triazole (6 carbon) alanine olefin amino acid connected by an all-carbon crosslinker comprising one double bond
  misc_feature (4)..(11): Crosslink between residues
  MOD_RES (10)..(10): Cyclopentyl-Gly
  MOD_RES (11)..(11): Alpha-Me alkyne 1,4 triazole (5 carbon) alanine olefin amino acid connected by an all-carbon crosslinker comprising one double bond
  C-term NH2
LTFAEYWAQGASAA

SEQ ID NO: 1712 - protein, 14 aa, Artificial Sequence
  Description of Artificial Sequence: Synthetic peptide
  N-term Ac
  MOD_RES (4)..(4): Alpha-Me R-azide 1,4 triazole (6 carbon) alanine olefin amino acid connected by an all-carbon crosslinker comprising one double bond
  misc_feature (4)..(11): Crosslink between residues
  MOD_RES (11)..(11): Alpha-Me alkyne 1,4 triazole (5 carbon) alanine olefin amino acid connected by an all-carbon crosslinker comprising one double bond
  C-term NH2
LTFAEYWAQFASAA

SEQ ID NO: 1713 - protein, 14 aa, Artificial Sequence
  Description of Artificial Sequence: Synthetic peptide
  N-term Ac
  MOD_RES (4)..(4): Alpha-Me R-azide 1,4 triazole (6 carbon) alanine olefin amino acid connected by an all-carbon crosslinker comprising one double bond
  misc_feature (4)..(11): Crosslink between residues
  MOD_RES (11)..(11): Alpha-Me alkyne 1,4 triazole (5 carbon) alanine olefin amino acid connected by an all-carbon crosslinker comprising one double bond
  C-term NH2
LTFAEYWAQFASAA

SEQ ID NO: 1714 - protein, 14 aa, Artificial Sequence
  Description of Artificial Sequence: Synthetic peptide
  N-term Ac
  MOD_RES (4)..(4): Alpha-Me R-azide 1,4 triazole (6 carbon) alanine olefin amino acid connected by an all-carbon crosslinker comprising one double bond
  misc_feature (4)..(11): Crosslink between residues
  MOD_RES (10)..(10): Cyclobutyl-Ala
  MOD_RES (11)..(11): Alpha-Me alkyne 1,4 triazole (5 carbon) alanine olefin amino acid connected by an all-carbon crosslinker comprising one double bond
  C-term NH2
LTFAEYWAQAASAA

SEQ ID NO: 1715 - protein, 14 aa, Artificial Sequence
  Description of Artificial Sequence: Synthetic peptide
  N-term Ac
  MOD_RES (4)..(4): Alpha-Me R-azide 1,4 triazole (6 carbon) alanine olefin amino acid connected by an all-carbon crosslinker comprising one double bond
  misc_feature (4)..(11): Crosslink between residues
  MOD_RES (10)..(10): Cyclobutyl-Ala
  MOD_RES (11)..(11): Alpha-Me alkyne 1,4 triazole (5 carbon) alanine olefin amino acid connected by an all-carbon crosslinker comprising one double bond
  C-term NH2
LTFAEYWAQAASAA

SEQ ID NO: 1716 - protein, 14 aa, Artificial Sequence
  Description of Artificial Sequence: Synthetic peptide
  N-term Ac
  MOD_RES (3)..(3): 3-chloro-Phe
  MOD_RES (4)..(4): Alpha-Me R-azide 1,4 triazole (6 carbon) alanine olefin amino acid connected by an all-carbon crosslinker comprising one double bond
  misc_feature (4)..(11): Crosslink between residues
  MOD_RES (11)..(11): Alpha-Me alkyne 1,4 triazole (5 carbon) alanine olefin amino acid connected by an all-carbon crosslinker comprising one double bond
  C-term NH2
LTFAEYWAQLASAA

SEQ ID NO: 1717 - protein, 14 aa, Artificial Sequence
  Description of Artificial Sequence: Synthetic peptide
  N-term Ac
  MOD_RES (3)..(3): 3-chloro-Phe
  MOD_RES (4)..(4): Alpha-Me R-azide 1,4 triazole (6 carbon) alanine olefin amino acid connected by an all-carbon crosslinker comprising one double bond
  misc_feature (4)..(11): Crosslink between residues
  MOD_RES (11)..(11): Alpha-Me alkyne 1,4 triazole (5 carbon) alanine olefin amino acid connected by an all-carbon crosslinker comprising one double bond
  C-term NH2
LTFAEYWAQLASAA

SEQ ID NO: 1718 - protein, 14 aa, Artificial Sequence
  Description of Artificial Sequence: Synthetic peptide
  N-term Ac
  MOD_RES (3)..(3): 3,4-difluoro-Phe
  MOD_RES (4)..(4): Alpha-Me R-azide 1,4 triazole (6 carbon) alanine olefin amino acid connected by an all-carbon crosslinker comprising one double bond
  misc_feature (4)..(11): Crosslink between residues
  MOD_RES (11)..(11): Alpha-Me alkyne 1,4 triazole (5 carbon) alanine olefin amino acid connected by an all-carbon crosslinker comprising one double bond
  C-term NH2
LTFAEYWAQLASAA

SEQ ID NO: 1719 - protein, 14 aa, Artificial Sequence
  Description of Artificial Sequence: Synthetic peptide
  N-term Ac
  MOD_RES (3)..(3): 3,4-difluoro-Phe
  MOD_RES (4)..(4): Alpha-Me R-azide 1,4 triazole (6 carbon) alanine olefin amino acid connected by an all-carbon crosslinker comprising one double bond
  misc_feature (4)..(11): Crosslink between residues
  MOD_RES (11)..(11): Alpha-Me alkyne 1,4 triazole (5 carbon) alanine olefin amino acid connected by an all-carbon crosslinker comprising one double bond
  C-term NH2
LTFAEYWAQLASAA

SEQ ID NO: 1720 - protein, 14 aa, Artificial Sequence
  Description of Artificial Sequence: Synthetic peptide
  N-term Ac
  MOD_RES (3)..(3): 3,4-difluoro-Phe
  MOD_RES (4)..(4): Alpha-Me R-azide 1,4 triazole (6 carbon) alanine olefin amino acid connected by an all-carbon crosslinker comprising one double bond
  misc_feature (4)..(11): Crosslink between residues
  MOD_RES (10)..(10): homo-Leu
  MOD_RES (11)..(11): Alpha-Me alkyne 1,4 triazole (5 carbon) alanine olefin amino acid connected by an all-carbon crosslinker comprising one double bond
  C-term NH2
LTFAEYWAQLASAA

SEQ ID NO: 1721 - protein, 14 aa, Artificial Sequence
  Description of Artificial Sequence: Synthetic peptide
  N-term Ac
  MOD_RES (3)..(3): 3,4-difluoro-Phe
  MOD_RES (4)..(4): Alpha-Me R-azide 1,4 triazole (6 carbon) alanine olefin amino acid connected by an all-carbon crosslinker comprising one double bond
  misc_feature (4)..(11): Crosslink between residues
  MOD_RES (10)..(10): homo-Leu
  MOD_RES (11)..(11): Alpha-Me alkyne 1,4 triazole (5 carbon) alanine olefin amino acid connected by an all-carbon crosslinker comprising one double bond
  C-term NH2
LTFAEYWAQLASAA

SEQ ID NO: 1722 - protein, 14 aa, Artificial Sequence
  Description of Artificial Sequence: Synthetic peptide
  N-term Ac
  MOD_RES (4)..(4): Alpha-Me R-azide 1,4 triazole (6 carbon) alanine olefin amino acid connected by an all-carbon crosslinker comprising one double bond
  misc_feature (4)..(11): Crosslink between residues
  MOD_RES (11)..(11): Alpha-Me alkyne 1,4 triazole (5 carbon) alanine olefin amino acid connected by an all-carbon crosslinker comprising one double bond
  C-term NH2
ETFAEYWAQLASAA

SEQ ID NO: 1723 - protein, 14 aa, Artificial Sequence
  Description of Artificial Sequence: Synthetic peptide
  N-term Ac
  MOD_RES (4)..(4): Alpha-Me R-azide 1,4 triazole (6 carbon) alanine olefin amino acid connected by an all-carbon crosslinker comprising one double bond
  misc_feature (4)..(11): Crosslink between residues
  MOD_RES (11)..(11): Alpha-Me alkyne 1,4 triazole (5 carbon) alanine olefin amino acid connected by an all-carbon crosslinker comprising one double bond
  C-term NH2
LTFAAYWVQLASAA

SEQ ID NO: 1724 - protein, 14 aa, Artificial Sequence
  Description of Artificial Sequence: Synthetic peptide
  N-term Ac
  MOD_RES (4)..(4): Alpha-Me R-azide 1,4 triazole (6 carbon) alanine olefin amino acid connected by an all-carbon crosslinker comprising one double bond
  misc_feature (4)..(11): Crosslink between residues
  MOD_RES (11)..(11): Alpha-Me alkyne 1,4 triazole (5 carbon) alanine olefin amino acid connected by an all-carbon crosslinker comprising one double bond
  C-term NH2
LTFAAHWAQLASAA

SEQ ID NO: 1725 - protein, 14 aa, Artificial Sequence
  Description of Artificial Sequence: Synthetic peptide
  N-term Ac
  MOD_RES (4)..(4): Alpha-Me R-azide 1,4 triazole (6 carbon) alanine olefin amino acid connected by an all-carbon crosslinker comprising one double bond
  misc_feature (4)..(11): Crosslink between residues
  MOD_RES (11)..(11): Alpha-Me alkyne 1,4 triazole (5 carbon) alanine olefin amino acid connected by an all-carbon crosslinker comprising one double bond
  C-term NH2
LTFAAEWAQLASAA

SEQ ID NO: 1726 - protein, 14 aa, Artificial Sequence
  Description of Artificial Sequence: Synthetic peptide
  N-term Ac
  MOD_RES (4)..(4): Alpha-Me R-azide 1,4 triazole (6 carbon) alanine olefin amino acid connected by an all-carbon crosslinker comprising one double bond
  misc_feature (4)..(11): Crosslink between residues
  MOD_RES (11)..(11): Alpha-Me alkyne 1,4 triazole (5 carbon) alanine olefin amino acid connected by an all-carbon crosslinker comprising one double bond
  C-term NH2
LTFAASWAQLASAA

SEQ ID NO: 1727 - protein, 14 aa, Artificial Sequence
  Description of Artificial Sequence: Synthetic peptide
  N-term Ac
  MOD_RES (4)..(4): Alpha-Me R-azide 1,4 triazole (6 carbon) alanine olefin amino acid connected by an all-carbon crosslinker comprising one double bond
  misc_feature (4)..(11): Crosslink between residues
  MOD_RES (11)..(11): Alpha-Me alkyne 1,4 triazole (5 carbon) alanine olefin amino acid connected by an all-carbon crosslinker comprising one double bond
  C-term NH2
LTFAAEWAQLASAA

SEQ ID NO: 1728 - protein, 14 aa, Artificial Sequence
  Description of Artificial Sequence: Synthetic peptide
  N-term Ac
  MOD_RES (4)..(4): Alpha-Me R-azide 1,4 triazole (6 carbon) alanine olefin amino acid connected by an all-carbon crosslinker comprising one double bond
  misc_feature (4)..(11): Crosslink between residues
  MOD_RES (11)..(11): Alpha-Me alkyne 1,4 triazole (5 carbon) alanine olefin amino acid connected by an all-carbon crosslinker comprising one double bond
  C-term NH2
LTFAASWAQLASAA

SEQ ID NO: 1729 - protein, 14 aa, Artificial Sequence
  Description of Artificial Sequence: Synthetic peptide
  N-term Ac
  MOD_RES (4)..(4): Alpha-Me R-azide 1,4 triazole (6 carbon) alanine olefin amino acid connected by an all-carbon crosslinker comprising one double bond
  misc_feature (4)..(11): Crosslink between residues
  MOD_RES (6)..(6): 4-carboxy-Phe
  MOD_RES (11)..(11): Alpha-Me alkyne 1,4 triazole (5 carbon) alanine olefin amino acid connected by an all-carbon crosslinker comprising one double bond
  C-term NH2
LTFAAFWAQLASAA

SEQ ID NO: 1730 - protein, 14 aa, Artificial Sequence
  Description of Artificial Sequence: Synthetic peptide
  N-term Ac
  MOD_RES (4)..(4): Alpha-Me R-azide 1,4 triazole (6 carbon) alanine olefin amino acid connected by an all-carbon crosslinker comprising one double bond
  misc_feature (4)..(11): Crosslink between residues
  MOD_RES (6)..(6): 4-carboxy-Phe
  MOD_RES (11)..(11): Alpha-Me alkyne 1,4 triazole (5 carbon) alanine olefin amino acid connected by an all-carbon crosslinker comprising one double bond
  C-term NH2
LTFAAFWAQLASAA

SEQ ID NO: 1731 - protein, 15 aa, Artificial Sequence
  Description of Artificial Sequence: Synthetic peptide
  N-term Ac
  MOD_RES (4)..(4): Alpha-Me R-azide 1,4 triazole (6 carbon) alanine olefin amino acid connected by an all-carbon crosslinker comprising one double bond
  misc_feature (4)..(11): Crosslink between residues
  MOD_RES (11)..(11): Alpha-Me alkyne 1,4 triazole (5 carbon) alanine olefin amino acid connected by an all-carbon crosslinker comprising one double bond
  MOD_RES (15)..(15): D-amino acid
  C-term NH2
LTFAAHWAQLAAAIA

SEQ ID NO: 1732 - protein, 15 aa, Artificial Sequence
  Description of Artificial Sequence: Synthetic peptide
  N-term Ac
  MOD_RES (4)..(4): Alpha-Me R-azide 1,4 triazole (6 carbon) alanine olefin amino acid connected by an all-carbon crosslinker comprising one double bond
  misc_feature (4)..(11): Crosslink between residues
  MOD_RES (11)..(11): Alpha-Me alkyne 1,4 triazole (5 carbon) alanine olefin amino acid connected by an all-carbon crosslinker comprising one double bond
  MOD_RES (15)..(15): D-amino acid
  C-term NH2
ITFAFYWAQLAAAIA

SEQ ID NO: 1733 - protein, 15 aa, Artificial Sequence
  Description of Artificial Sequence: Synthetic peptide
  N-term Ac
  MOD_RES (4)..(4): Alpha-Me R-azide 1,4 triazole (6 carbon) alanine olefin amino acid connected by an all-carbon crosslinker comprising one double bond
  misc_feature (4)..(11): Crosslink between residues
  MOD_RES (11)..(11): Alpha-Me alkyne 1,4 triazole (5 carbon) alanine olefin amino acid connected by an all-carbon crosslinker comprising one double bond
  MOD_RES (15)..(15): D-amino acid
  C-term NH2
ITFAEHWAQLAAAIA

SEQ ID NO: 1734 - protein, 15 aa, Artificial Sequence
  Description of Artificial Sequence: Synthetic peptide
  N-term Ac
  MOD_RES (4)..(4): Alpha-Me R-azide 1,4 triazole (6 carbon) alanine olefin amino acid connected by an all-carbon crosslinker comprising one double bond
  misc_feature (4)..(11): Crosslink between residues
  MOD_RES (11)..(11): Alpha-Me alkyne 1,4 triazole (5 carbon) alanine olefin amino acid connected by an all-carbon crosslinker comprising one double bond
  MOD_RES (15)..(15): D-amino acid
  C-term NH2
ITFAEHWAQLAAAIA

SEQ ID NO: 1735 - protein, 15 aa, Artificial Sequence
  Description of Artificial Sequence: Synthetic peptide
  N-term Ac
  MOD_RES (4)..(4): Alpha-Me R-azide 1,4 triazole (6 carbon) alanine olefin amino acid connected by an all-carbon crosslinker comprising one double bond
  misc_feature (4)..(11): Crosslink between residues
  MOD_RES (11)..(11): Alpha-Me alkyne 1,4 triazole (5 carbon) alanine olefin amino acid connected by an all-carbon crosslinker comprising one double bond
  MOD_RES (15)..(15): D-amino acid
  C-term NH2
ETFAEHWAQLAAAIA

SEQ ID NO: 1736 - protein, 15 aa, Artificial Sequence
  Description of Artificial Sequence: Synthetic peptide
  N-term Ac
  MOD_RES (4)..(4): Alpha-Me R-azide 1,4 triazole (6 carbon) alanine olefin amino acid connected by an all-carbon crosslinker comprising one double bond
  misc_feature (4)..(11): Crosslink between residues
  MOD_RES (11)..(11): Alpha-Me alkyne 1,4 triazole (5 carbon) alanine olefin amino acid connected by an all-carbon crosslinker comprising one double bond
  MOD_RES (15)..(15): D-amino acid
  C-term NH2
ETFAEHWAQLAAAIA

SEQ ID NO: 1737 - protein, 15 aa, Artificial Sequence
  Description of Artificial Sequence: Synthetic peptide
  N-term Ac
  MOD_RES (4)..(4): Alpha-Me R-azide 1,4 triazole (6 carbon) alanine olefin amino acid connected by an all-carbon crosslinker comprising one double bond
  misc_feature (4)..(11): Crosslink between residues
  MOD_RES (11)..(11): Alpha-Me alkyne 1,4 triazole (5 carbon) alanine olefin amino acid connected by an all-carbon crosslinker comprising one double bond
  MOD_RES (15)..(15): D-amino acid
  C-term NH2
LTFAAHWVQLAAAIA

SEQ ID NO: 1738 - protein, 15 aa, Artificial Sequence
  Description of Artificial Sequence: Synthetic peptide
  N-term Ac
  MOD_RES (4)..(4): Alpha-Me R-azide 1,4 triazole (6 carbon) alanine olefin amino acid connected by an all-carbon crosslinker comprising one double bond
  misc_feature (4)..(11): Crosslink between residues
  MOD_RES (11)..(11): Alpha-Me alkyne 1,4 triazole (5 carbon) alanine olefin amino acid connected by an all-carbon crosslinker comprising one double bond
  MOD_RES (15)..(15): D-amino acid
  C-term NH2
ITFAFYWVQLAAAIA

SEQ ID NO: 1739 - protein, 15 aa, Artificial Sequence
  Description of Artificial Sequence: Synthetic peptide
  N-term Ac
  MOD_RES (4)..(4): Alpha-Me R-azide 1,4 triazole (6 carbon) alanine olefin amino acid connected by an all-carbon crosslinker comprising one double bond
  misc_feature (4)..(11): Crosslink between residues
  MOD_RES (11)..(11): Alpha-Me alkyne 1,4 triazole (5 carbon) alanine olefin amino acid connected by an all-carbon crosslinker comprising one double bond
  MOD_RES (15)..(15): D-amino acid
  C-term NH2
ITFAEYWVQLAAAIA

SEQ ID NO: 1740 - protein, 15 aa, Artificial Sequence
  Description of Artificial Sequence: Synthetic peptide
  N-term Ac
  MOD_RES (4)..(4): Alpha-Me R-azide 1,4 triazole (6 carbon) alanine olefin amino acid connected by an all-carbon crosslinker comprising one double bond
  misc_feature (4)..(11): Crosslink between residues
  MOD_RES (11)..(11): Alpha-Me alkyne 1,4 triazole (5 carbon) alanine olefin amino acid connected by an all-carbon crosslinker comprising one double bond
  MOD_RES (15)..(15): D-amino acid
  C-term NH2
ITFAEHWVQLAAAIA

SEQ ID NO: 1741 - protein, 15 aa, Artificial Sequence
  Description of Artificial Sequence: Synthetic peptide
  N-term Ac
  MOD_RES (4)..(4): Alpha-Me R-azide 1,4 triazole (6 carbon) alanine olefin amino acid connected by an all-carbon crosslinker comprising one double bond
  misc_feature (4)..(11): Crosslink between residues
  MOD_RES (11)..(11): Alpha-Me alkyne 1,4 triazole (5 carbon) alanine olefin amino acid connected by an all-carbon crosslinker comprising one double bond
  MOD_RES (15)..(15): D-amino acid
  C-term NH2
LTFAAEWAQLAAAIA

SEQ ID NO: 1742 - protein, 15 aa, Artificial Sequence
  Description of Artificial Sequence: Synthetic peptide
  N-term Ac
  MOD_RES (4)..(4): Alpha-Me R-azide 1,4 triazole (6 carbon) alanine olefin amino acid connected by an all-carbon crosslinker comprising one double bond
  misc_feature (4)..(11): Crosslink between residues
  MOD_RES (6)..(6): 4-carboxy-Phe
  MOD_RES (11)..(11): Alpha-Me alkyne 1,4 triazole (5 carbon) alanine olefin amino acid connected by an all-carbon crosslinker comprising one double bond
  MOD_RES (15)..(15): D-amino acid
  C-term NH2
LTFAAFWAQLAAAIA

SEQ ID NO: 1743 - protein, 15 aa, Artificial Sequence
  Description of Artificial Sequence: Synthetic peptide
  N-term Ac
  MOD_RES (4)..(4): Alpha-Me R-azide 1,4 triazole (6 carbon) alanine olefin amino acid connected by an all-carbon crosslinker comprising one double bond
  misc_feature (4)..(11): Crosslink between residues
  MOD_RES (6)..(6): 4-carboxy-Phe
  MOD_RES (11)..(11): Alpha-Me alkyne 1,4 triazole (5 carbon) alanine olefin amino acid connected by an all-carbon crosslinker comprising one double bond
  MOD_RES (15)..(15): D-amino acid
  C-term NH2
LTFAAFWAQLAAAIA

SEQ ID NO: 1744 - protein, 15 aa, Artificial Sequence
  Description of Artificial Sequence: Synthetic peptide
  N-term Ac
  MOD_RES (4)..(4): Alpha-Me R-azide 1,4 triazole (6 carbon) alanine olefin amino acid connected by an all-carbon crosslinker comprising one double bond
  misc_feature (4)..(11): Crosslink between residues
  MOD_RES (11)..(11): Alpha-Me alkyne 1,4 triazole (5 carbon) alanine olefin amino acid connected by an all-carbon crosslinker comprising one double bond
  C-term NH2
LTFAAHWAQLAAHFA

SEQ ID NO: 1745 - protein, 15 aa, Artificial Sequence
  Description of Artificial Sequence: Synthetic peptide
  N-term Ac
  MOD_RES (4)..(4): Alpha-Me R-azide 1,4 triazole (6 carbon) alanine olefin amino acid connected by an all-carbon crosslinker comprising one double bond
  misc_feature (4)..(11): Crosslink between residues
  MOD_RES (11)..(11): Alpha-Me alkyne 1,4 triazole (5 carbon) alanine olefin amino acid connected by an all-carbon crosslinker comprising one double bond
  C-term NH2
ITFAFYWAQLAAHFA

SEQ ID NO: 1746 - protein, 15 aa, Artificial Sequence
  Description of Artificial Sequence: Synthetic peptide
  N-term Ac
  MOD_RES (4)..(4): Alpha-Me R-azide 1,4 triazole (6 carbon) alanine olefin amino acid connected by an all-carbon crosslinker comprising one double bond
  misc_feature (4)..(11): Crosslink between residues
  MOD_RES (11)..(11): Alpha-Me alkyne 1,4 triazole (5 carbon) alanine olefin amino acid connected by an all-carbon crosslinker comprising one double bond
  C-term NH2
ITFAFYWAQLAAHFA

SEQ ID NO: 1747 - protein, 15 aa, Artificial Sequence
  Description of Artificial Sequence: Synthetic peptide
  N-term Ac
  MOD_RES (4)..(4): Alpha-Me R-azide 1,4 triazole (6 carbon) alanine olefin amino acid connected by an all-carbon crosslinker comprising one double bond
  misc_feature (4)..(11): Crosslink between residues
  MOD_RES (11)..(11): Alpha-Me alkyne 1,4 triazole (5 carbon) alanine olefin amino acid connected by an all-carbon crosslinker comprising one double bond
  C-term NH2
ITFAFHWAQLAAEFA

SEQ ID NO: 1748 - protein, 15 aa, Artificial Sequence
  Description of Artificial Sequence: Synthetic peptide
  N-term Ac
  MOD_RES (4)..(4): Alpha-Me R-azide 1,4 triazole (6 carbon) alanine olefin amino acid connected by an all-carbon crosslinker comprising one double bond
  misc_feature (4)..(11): Crosslink between residues
  MOD_RES (11)..(11): Alpha-Me alkyne 1,4 triazole (5 carbon) alanine olefin amino acid connected by an all-carbon crosslinker comprising one double bond
  C-term NH2
ITFAFHWAQLAAEFA

SEQ ID NO: 1749 - protein, 15 aa, Artificial Sequence
  Description of Artificial Sequence: Synthetic peptide
  N-term Ac
  MOD_RES (4)..(4): Alpha-Me R-azide 1,4 triazole (6 carbon) alanine olefin amino acid connected by an all-carbon crosslinker comprising one double bond
  misc_feature (4)..(11): Crosslink between residues
  MOD_RES (11)..(11): Alpha-Me alkyne 1,4 triazole (5 carbon) alanine olefin amino acid connected by an all-carbon crosslinker comprising one double bond
  C-term NH2
ITFAEHWAQLAAHFA

SEQ ID NO: 1750 - protein, 15 aa, Artificial Sequence
  Description of Artificial Sequence: Synthetic peptide
  N-term Ac
  MOD_RES (4)..(4): Alpha-Me R-azide 1,4 triazole (6 carbon) alanine olefin amino acid connected by an all-carbon crosslinker comprising one double bond
  misc_feature (4)..(11): Crosslink between residues
  MOD_RES (11)..(11): Alpha-Me alkyne 1,4 triazole (5 carbon) alanine olefin amino acid connected by an all-carbon crosslinker comprising one double bond
  C-term NH2
ITFAEHWAQLAAHFA

SEQ ID NO: 1751 - protein, 15 aa, Artificial Sequence
  Description of Artificial Sequence: Synthetic peptide
  N-term Ac
  MOD_RES (4)..(4): Alpha-Me R-azide 1,4 triazole (6 carbon) alanine olefin amino acid connected by an all-carbon crosslinker comprising one double bond
  misc_feature (4)..(11): Crosslink between residues
  MOD_RES (11)..(11): Alpha-Me alkyne 1,4 triazole (5 carbon) alanine olefin amino acid connected by an all-carbon crosslinker comprising one double bond
  C-term NH2
LTFAAHWVQLAAHFA

SEQ ID NO: 1752 - protein, 15 aa, Artificial Sequence
  Description of Artificial Sequence: Synthetic peptide
  N-term Ac
  MOD_RES (4)..(4): Alpha-Me R-azide 1,4 triazole (6 carbon) alanine olefin amino acid connected by an all-carbon crosslinker comprising one double bond
  misc_feature (4)..(11): Crosslink between residues
  MOD_RES (11)..(11): Alpha-Me alkyne 1,4 triazole (5 carbon) alanine olefin amino acid connected by an all-carbon crosslinker comprising one double bond
  C-term NH2
ITFAFYWVQLAAHFA

SEQ ID NO: 1753 - protein, 15 aa, Artificial Sequence
  Description of Artificial Sequence: Synthetic peptide
  N-term Ac
  MOD_RES (4)..(4): Alpha-Me R-azide 1,4 triazole (6 carbon) alanine olefin amino acid connected by an all-carbon crosslinker comprising one double bond
  misc_feature (4)..(11): Crosslink between residues
  MOD_RES (11)..(11): Alpha-Me alkyne 1,4 triazole (5 carbon) alanine olefin amino acid connected by an all-carbon crosslinker comprising one double bond
  C-term NH2
ITFAEYWVQLAAHFA

SEQ ID NO: 1754 - protein, 15 aa, Artificial Sequence
  Description of Artificial Sequence: Synthetic peptide
  N-term Ac
  MOD_RES (4)..(4): Alpha-Me R-azide 1,4 triazole (6 carbon) alanine olefin amino acid connected by an all-carbon crosslinker comprising one double bond
  misc_feature (4)..(11): Crosslink between residues
  MOD_RES (11)..(11): Alpha-Me alkyne 1,4 triazole (5 carbon) alanine olefin amino acid connected by an all-carbon crosslinker comprising one double bond
  C-term NH2
ITFAEHWVQLAAHFA

SEQ ID NO: 1755 - protein, 15 aa, Artificial Sequence
  Description of Artificial Sequence: Synthetic peptide
  N-term Ac
  MOD_RES (4)..(4): Alpha-Me R-azide 1,4 triazole (6 carbon) alanine olefin amino acid connected by an all-carbon crosslinker comprising one double bond
  misc_feature (4)..(11): Crosslink between residues
  MOD_RES (11)..(11): Alpha-Me alkyne 1,4 triazole (5 carbon) alanine olefin amino acid connected by an all-carbon crosslinker comprising one double bond
  C-term NH2
ITFAEHWVQLAAHFA

SEQ ID NO: 1756 - protein, 14 aa, Artificial Sequence
  Description of Artificial Sequence: Synthetic peptide
  N-term Ac
  MOD_RES (4)..(4): Alpha-Me R-azide 1,4 triazole (6 carbon) alanine olefin amino acid connected by an all-carbon crosslinker comprising one double bond
  misc_feature (4)..(11): Crosslink between residues
  MOD_RES (11)..(11): Alpha-Me alkyne 1,4 triazole (5 carbon) alanine olefin amino acid connected by an all-carbon crosslinker comprising one double bond
  C-term NH2
ETFAEYWAALASAA

SEQ ID NO: 1757 - protein, 14 aa, Artificial Sequence
  Description of Artificial Sequence: Synthetic peptide
  N-term Ac
  MOD_RES (4)..(4): Alpha-Me R-azide 1,4 triazole (6 carbon) alanine olefin amino acid connected by an all-carbon crosslinker comprising one double bond
  misc_feature (4)..(11): Crosslink between residues
  MOD_RES (11)..(11): Alpha-Me alkyne 1,4 triazole (5 carbon) alanine olefin amino acid connected by an all-carbon crosslinker comprising one double bond
  C-term NH2
LTFAAYWVALASAA

SEQ ID NO: 1758 - protein, 14 aa, Artificial Sequence
  Description of Artificial Sequence: Synthetic peptide
  N-term Ac
  MOD_RES (4)..(4): Alpha-Me R-azide 1,4 triazole (6 carbon) alanine olefin amino acid connected by an all-carbon crosslinker comprising one double bond
  misc_feature (4)..(11): Crosslink between residues
  MOD_RES (11)..(11): Alpha-Me alkyne 1,4 triazole (5 carbon) alanine olefin amino acid connected by an all-carbon crosslinker comprising one double bond
  C-term NH2
LTFAAHWAALASAA

SEQ ID NO: 1759 - protein, 14 aa, Artificial Sequence
  Description of Artificial Sequence: Synthetic peptide
  N-term Ac
  MOD_RES (4)..(4): Alpha-Me R-azide 1,4 triazole (6 carbon) alanine olefin amino acid connected by an all-carbon crosslinker comprising one double bond
  misc_feature (4)..(11): Crosslink between residues
  MOD_RES (11)..(11): Alpha-Me alkyne 1,4 triazole (5 carbon) alanine olefin amino acid connected by an all-carbon crosslinker comprising one double bond
  C-term NH2
LTFAAEWAALASAA

SEQ ID NO: 1760 - protein, 14 aa, Artificial Sequence
  Description of Artificial Sequence: Synthetic peptide
  N-term Ac
  MOD_RES (4)..(4): Alpha-Me R-azide 1,4 triazole (6 carbon) alanine olefin amino acid connected by an all-carbon crosslinker comprising one double bond
  misc_feature (4)..(11): Crosslink between residues
  MOD_RES (11)..(11): Alpha-Me alkyne 1,4 triazole (5 carbon) alanine olefin amino acid connected by an all-carbon crosslinker comprising one double bond
  C-term NH2
LTFAAEWAALASAA

SEQ ID NO: 1761 - protein, 14 aa, Artificial Sequence
  Description of Artificial Sequence: Synthetic peptide
  N-term Ac
  MOD_RES (4)..(4): Alpha-Me R-azide 1,4 triazole (6 carbon) alanine olefin amino acid connected by an all-carbon crosslinker comprising one double bond
  misc_feature (4)..(11): Crosslink between residues
  MOD_RES (11)..(11): Alpha-Me alkyne 1,4 triazole (5 carbon) alanine olefin amino acid connected by an all-carbon crosslinker comprising one double bond
  C-term NH2
LTFAASWAALASAA

SEQ ID NO: 1762 - protein, 14 aa, Artificial Sequence
  Description of Artificial Sequence: Synthetic peptide
  N-term Ac
  MOD_RES (4)..(4): Alpha-Me R-azide 1,4 triazole (6 carbon) alanine olefin amino acid connected by an all-carbon crosslinker comprising one double bond
  misc_feature (4)..(11): Crosslink between residues
  MOD_RES (11)..(11): Alpha-Me alkyne 1,4 triazole (5 carbon) alanine olefin amino acid connected by an all-carbon crosslinker comprising one double bond
  C-term NH2
LTFAASWAALASAA

SEQ ID NO: 1763 - protein, 15 aa, Artificial Sequence
  Description of Artificial Sequence: Synthetic peptide
  N-term Ac
  MOD_RES (4)..(4): Alpha-Me R-azide 1,4 triazole (6 carbon) alanine olefin amino acid connected by an all-carbon crosslinker comprising one double bond
  misc_feature (4)..(11): Crosslink between residues
  MOD_RES (11)..(11): Alpha-Me alkyne 1,4 triazole (5 carbon) alanine olefin amino acid connected by an all-carbon crosslinker comprising one double bond
  MOD_RES (15)..(15): D-amino acid
  C-term NH2
LTFAAYWAALAAAIA

SEQ ID NO: 1764 - protein, 15 aa, Artificial Sequence
  Description of Artificial Sequence: Synthetic peptide
  N-term Ac
  MOD_RES (4)..(4): Alpha-Me R-azide 1,4 triazole (6 carbon) alanine olefin amino acid connected by an all-carbon crosslinker comprising one double bond
  misc_feature (4)..(11): Crosslink between residues
  MOD_RES (11)..(11): Alpha-Me alkyne 1,4 triazole (5 carbon) alanine olefin amino acid connected by an all-carbon crosslinker comprising one double bond
  MOD_RES (15)..(15): D-amino acid
  C-term NH2
LTFAAYWAALAAAIA

SEQ ID NO: 1765 - protein, 15 aa, Artificial Sequence
  Description of Artificial Sequence: Synthetic peptide
  N-term Ac
  MOD_RES (4)..(4): Alpha-Me R-azide 1,4 triazole (6 carbon) alanine olefin amino acid connected by an all-carbon crosslinker comprising one double bond
  misc_feature (4)..(11): Crosslink between residues
  MOD_RES (11)..(11): Alpha-Me alkyne 1,4 triazole (5 carbon) alanine olefin amino acid connected by an all-carbon crosslinker comprising one double bond
  C-term NH2
LTFAAYWAALAAHFA

SEQ ID NO: 1766 - protein, 15 aa, Artificial Sequence
  Description of Artificial Sequence: Synthetic peptide
  N-term Ac
  MOD_RES (4)..(4): Alpha-Me R-azide 1,4 triazole (6 carbon) alanine olefin amino acid connected by an all-carbon crosslinker comprising one double bond
  misc_feature (4)..(11): Crosslink between residues
  MOD_RES (11)..(11): Alpha-Me alkyne 1,4 triazole (5 carbon) alanine olefin amino acid connected by an all-carbon crosslinker comprising one double bond
  MOD_RES (15)..(15): D-amino acid
  C-term NH2
LTFAEHWAQLAAHIA

SEQ ID NO: 1767 - protein, 15 aa, Artificial Sequence
  Description of Artificial Sequence: Synthetic peptide
  N-term Ac
  MOD_RES (4)..(4): Alpha-Me R-azide 1,4 triazole (6 carbon) alanine olefin amino acid connected by an all-carbon crosslinker comprising one double bond
  misc_feature (4)..(11): Crosslink between residues
  MOD_RES (11)..(11): Alpha-Me alkyne 1,4 triazole (5 carbon) alanine olefin amino acid connected by an all-carbon crosslinker comprising one double bond
  MOD_RES (15)..(15): D-amino acid
  C-term NH2
LTFAEHWAQLAAHIA

SEQ ID NO: 1768 - protein, 15 aa, Artificial Sequence
  Description of Artificial Sequence: Synthetic peptide
  N-term Ac
  MOD_RES (4)..(4): Alpha-Me R-azide 1,4 triazole (6 carbon) alanine olefin amino acid connected by an all-carbon crosslinker comprising one double bond
  misc_feature (4)..(11): Crosslink between residues
  MOD_RES (11)..(11): Alpha-Me alkyne 1,4 triazole (5 carbon) alanine olefin amino acid connected by an all-carbon crosslinker comprising one double bond
  MOD_RES (15)..(15): D-amino acid
  C-term NH2
LTFAAHWAQLAAHIA

SEQ ID NO: 1769 - protein, 15 aa, Artificial Sequence
  Description of Artificial Sequence: Synthetic peptide
  N-term Ac
  MOD_RES (4)..(4): Alpha-Me R-azide 1,4 triazole (6 carbon) alanine olefin amino acid connected by an all-carbon crosslinker comprising one double bond
  misc_feature (4)..(11): Crosslink between residues
  MOD_RES (11)..(11): Alpha-Me alkyne 1,4 triazole (5 carbon) alanine olefin amino acid connected by an all-carbon crosslinker comprising one double bond
  MOD_RES (15)..(15): D-amino acid
  C-term NH2
LTFAEYWAQLAAHIA

SEQ ID NO: 1770 - protein, 15 aa, Artificial Sequence
  Description of Artificial Sequence: Synthetic peptide
  N-term Ac
  MOD_RES (4)..(4): Alpha-Me R-azide 1,4 triazole (6 carbon) alanine olefin amino acid connected by an all-carbon crosslinker comprising one double bond
  misc_feature (4)..(11): Crosslink between residues
  MOD_RES (11)..(11): Alpha-Me alkyne 1,4 triazole (5 carbon) alanine olefin amino acid connected by an all-carbon crosslinker comprising one double bond
  MOD_RES (15)..(15): D-amino acid
  C-term NH2
LTFAAYWAQLAAAFA

SEQ ID NO: 1771 - protein, 15 aa, Artificial Sequence
  Description of Artificial Sequence: Synthetic peptide
  N-term Ac
  MOD_RES (4)..(4): Alpha-Me R-azide 1,4 triazole (6 carbon) alanine olefin amino acid connected by an all-carbon crosslinker comprising one double bond
  misc_feature (4)..(11): Crosslink between residues
  MOD_RES (11)..(11): Alpha-Me alkyne 1,4 triazole (5 carbon) alanine olefin amino acid connected by an all-carbon crosslinker comprising one double bond
  MOD_RES (15)..(15): D-amino acid
  C-term NH2
LTFAAYWAQLAAAFA

SEQ ID NO: 1772 - protein, 15 aa, Artificial Sequence
  Description of Artificial Sequence: Synthetic peptide
  N-term Ac
  MOD_RES (4)..(4): Alpha-Me R-azide 1,4 triazole (6 carbon) alanine olefin amino acid connected by an all-carbon crosslinker comprising one double bond
  misc_feature (4)..(11): Crosslink between residues
  MOD_RES (11)..(11): Alpha-Me alkyne 1,4 triazole (5 carbon) alanine olefin amino acid connected by an all-carbon crosslinker comprising one double bond
  MOD_RES (15)..(15): D-amino acid
  C-term NH2
LTFAAYWAQLAAAWA

SEQ ID NO: 1773 - protein, 15 aa, Artificial Sequence
  Description of Artificial Sequence: Synthetic peptide
  N-term Ac
  MOD_RES (4)..(4): Alpha-Me R-azide 1,4 triazole (6 carbon) alanine olefin amino acid connected by an all-carbon crosslinker comprising one double bond
  misc_feature (4)..(11): Crosslink between residues
  MOD_RES (11)..(11): Alpha-Me alkyne 1,4 triazole (5 carbon) alanine olefin amino acid connected by an all-carbon crosslinker comprising one double bond
  MOD_RES (15)..(15): D-amino acid
  C-term NH2
LTFAAYWAQLAAAVA

SEQ ID NO: 1774 - protein, 15 aa, Artificial Sequence
  Description of Artificial Sequence: Synthetic peptide
  N-term Ac
  MOD_RES (4)..(4): Alpha-Me R-azide 1,4 triazole (6 carbon) alanine olefin amino acid connected by an all-carbon crosslinker comprising one double bond
  misc_feature (4)..(11): Crosslink between residues
  MOD_RES (11)..(11): Alpha-Me alkyne 1,4 triazole (5 carbon) alanine olefin amino acid connected by an all-carbon crosslinker comprising one double bond
  MOD_RES (15)..(15): D-amino acid
  C-term NH2
LTFAAYWAQLAAAVA

SEQ ID NO: 1775 - protein, 15 aa, Artificial Sequence
  Description of Artificial Sequence: Synthetic peptide
  N-term Ac
  MOD_RES (4)..(4): Alpha-Me R-azide 1,4 triazole (6 carbon) alanine olefin amino acid connected by an all-carbon crosslinker comprising one double bond
  misc_feature (4)..(11): Crosslink between residues
  MOD_RES (11)..(11): Alpha-Me alkyne 1,4 triazole (5 carbon) alanine olefin amino acid connected by an all-carbon crosslinker comprising one double bond
  MOD_RES (15)..(15): D-amino acid
  C-term NH2
LTFAAYWAQLAAALA

SEQ ID NO: 1776 - protein, 15 aa, Artificial Sequence
  Description of Artificial Sequence: Synthetic peptide
  N-term Ac
  MOD_RES (4)..(4): Alpha-Me R-azide 1,4 triazole (6 carbon) alanine olefin amino acid connected by an all-carbon crosslinker comprising one double bond
  misc_feature (4)..(11): Crosslink between residues
  MOD_RES (11)..(11): Alpha-Me alkyne 1,4 triazole (5 carbon) alanine olefin amino acid connected by an all-carbon crosslinker comprising one double bond
  MOD_RES (15)..(15): D-amino acid
  C-term NH2
LTFAAYWAQLAAALA

SEQ ID NO: 1777 - protein, 15 aa, Artificial Sequence
  Description of Artificial Sequence: Synthetic peptide
  N-term Ac
  MOD_RES (4)..(4): Alpha-Me R-azide 1,4 triazole (6 carbon) alanine olefin amino acid connected by an all-carbon crosslinker comprising one double bond
  misc_feature (4)..(11): Crosslink between residues
  MOD_RES (11)..(11): Alpha-Me alkyne 1,4 triazole (5 carbon) alanine olefin amino acid connected by an all-carbon crosslinker comprising one double bond
  MOD_RES (15)..(15): D-amino acid
  C-term NH2
LTFAEYWAQLAAAIA

SEQ ID NO: 1778 - protein, 15 aa, Artificial Sequence
  Description of Artificial Sequence: Synthetic peptide
  N-term Ac
  MOD_RES (4)..(4): Alpha-Me R-azide 1,4 triazole (6 carbon) alanine olefin amino acid connected by an all-carbon crosslinker comprising one double bond
  misc_feature (4)..(11): Crosslink between residues
  MOD_RES (11)..(11): Alpha-Me alkyne 1,4 triazole (5 carbon) alanine olefin amino acid connected by an all-carbon crosslinker comprising one double bond
  MOD_RES (15)..(15): D-amino acid
  C-term NH2
LTFAEYWAQLAAAIA

SEQ ID NO: 1779 - protein, 15 aa, Artificial Sequence
  Description of Artificial Sequence: Synthetic peptide
  N-term Ac
  MOD_RES (4)..(4): Alpha-Me R-azide 1,4 triazole (6 carbon) alanine olefin amino acid connected by an all-carbon crosslinker comprising one double bond
  misc_feature (4)..(11): Crosslink between residues
  MOD_RES (11)..(11): Alpha-Me alkyne 1,4 triazole (5 carbon) alanine olefin amino acid connected by an all-carbon crosslinker comprising one double bond
  MOD_RES (15)..(15): D-amino acid
  C-term NH2
LTFAEYWAQLAAAFA

SEQ ID NO: 1780 - protein, 15 aa, Artificial Sequence
  Description of Artificial Sequence: Synthetic peptide
  N-term Ac
  MOD_RES (4)..(4): Alpha-Me R-azide 1,4 triazole (6 carbon) alanine olefin amino acid connected by an all-carbon crosslinker comprising one double bond
  misc_feature (4)..(11): Crosslink between residues
  MOD_RES (11)..(11): Alpha-Me alkyne 1,4 triazole (5 carbon) alanine olefin amino acid connected by an all-carbon crosslinker comprising one double bond
  MOD_RES (15)..(15): D-amino acid
  C-term NH2
LTFAEYWAQLAAAFA

SEQ ID NO: 1781 - protein, 15 aa, Artificial Sequence
  Description of Artificial Sequence: Synthetic peptide
  N-term Ac
  MOD_RES (4)..(4): Alpha-Me R-azide 1,4 triazole (6 carbon) alanine olefin amino acid connected by an all-carbon crosslinker comprising one double bond
  misc_feature (4)..(11): Crosslink between residues
  MOD_RES (11)..(11): Alpha-Me alkyne 1,4 triazole (5 carbon) alanine olefin amino acid connected by an all-carbon crosslinker comprising one double bond
  MOD_RES (15)..(15): D-amino acid
  C-term NH2
LTFAEYWAQLAAAVA

SEQ ID NO: 1782 - protein, 15 aa, Artificial Sequence
  Description of Artificial Sequence: Synthetic peptide
  N-term Ac
  MOD_RES (4)..(4): Alpha-Me R-azide 1,4 triazole (6 carbon) alanine olefin amino acid connected by an all-carbon crosslinker comprising one double bond
  misc_feature (4)..(11): Crosslink between residues
  MOD_RES (11)..(11): Alpha-Me alkyne 1,4 triazole (5 carbon) alanine olefin amino acid connected by an all-carbon crosslinker comprising one double bond
  MOD_RES (15)..(15): D-amino acid
  C-term NH2
LTFAEYWAQLAAAVA

SEQ ID NO: 1783 - protein, 15 aa, Artificial Sequence
  Description of Artificial Sequence: Synthetic peptide
  N-term Ac
  MOD_RES (4)..(4): Alpha-Me R-azide 1,4 triazole (6 carbon) alanine olefin amino acid connected by an all-carbon crosslinker comprising one double bond
  misc_feature (4)..(11): Crosslink between residues
  MOD_RES (11)..(11): Alpha-Me alkyne 1,4 triazole (5 carbon) alanine olefin amino acid connected by an all-carbon crosslinker comprising one double bond
  MOD_RES (15)..(15): D-amino acid
  C-term NH2
LTFAEHWAQLAAAIA

SEQ ID NO: 1784 - protein, 15 aa, Artificial Sequence
  Description of Artificial Sequence: Synthetic peptide
  N-term Ac
  MOD_RES (4)..(4): Alpha-Me R-azide 1,4 triazole (6 carbon) alanine olefin amino acid connected by an all-carbon crosslinker comprising one double bond
  misc_feature (4)..(11): Crosslink between residues
  MOD_RES (11)..(11): Alpha-Me alkyne 1,4 triazole (5 carbon) alanine olefin amino acid connected by an all-carbon crosslinker comprising one double bond
  MOD_RES (15)..(15): D-amino acid
  C-term NH2
LTFAEHWAQLAAAIA

SEQ ID NO: 1785 - protein, 15 aa, Artificial Sequence
  Description of Artificial Sequence: Synthetic peptide
  N-term Ac
  MOD_RES (4)..(4): Alpha-Me R-azide 1,4 triazole (6 carbon) alanine olefin amino acid connected by an all-carbon crosslinker comprising one double bond
  misc_feature (4)..(11): Crosslink between residues
  MOD_RES (11)..(11): Alpha-Me alkyne 1,4 triazole (5 carbon) alanine olefin amino acid connected by an all-carbon crosslinker comprising one double bond
  MOD_RES (15)..(15): D-amino acid
  C-term NH2
LTFAEHWAQLAAAWA

SEQ ID NO: 1786 - protein, 15 aa, Artificial Sequence
  Description of Artificial Sequence: Synthetic peptide
  N-term Ac
  MOD_RES (4)..(4): Alpha-Me R-azide 1,4 triazole (6 carbon) alanine olefin amino acid connected by an all-carbon crosslinker comprising one double bond
  misc_feature (4)..(11): Crosslink between residues
  MOD_RES (11)..(11): Alpha-Me alkyne 1,4 triazole (5 carbon) alanine olefin amino acid connected by an all-carbon crosslinker comprising one double bond
  MOD_RES (15)..(15): D-amino acid
  C-term NH2
LTFAEHWAQLAAAWA

SEQ ID NO: 1787 - protein, 15 aa, Artificial Sequence
  Description of Artificial Sequence: Synthetic peptide
  N-term Ac
  MOD_RES (4)..(4): Alpha-Me R-azide 1,4 triazole (6 carbon) alanine olefin amino acid connected by an all-carbon crosslinker comprising one double bond
  misc_feature (4)..(11): Crosslink between residues
  MOD_RES (11)..(11): Alpha-Me alkyne 1,4 triazole (5 carbon) alanine olefin amino acid connected by an all-carbon crosslinker comprising one double bond
  MOD_RES (15)..(15): D-amino acid
  C-term NH2
LTFAEHWAQLAAALA

SEQ ID NO: 1788 - protein, 15 aa, Artificial Sequence
  Description of Artificial Sequence: Synthetic peptide
  N-term Ac
  MOD_RES (4)..(4): Alpha-Me R-azide 1,4 triazole (6 carbon) alanine olefin amino acid connected by an all-carbon crosslinker comprising one double bond
  misc_feature (4)..(11): Crosslink between residues
  MOD_RES (11)..(11): Alpha-Me alkyne 1,4 triazole (5 carbon) alanine olefin amino acid connected by an all-carbon crosslinker comprising one double bond
  MOD_RES (15)..(15): D-amino acid
  C-term NH2
LTFAEHWAQLAAALA

SEQ ID NO: 1789 - protein, 15 aa, Artificial Sequence
  Description of Artificial Sequence: Synthetic peptide
  N-term Ac
  MOD_RES (4)..(4): Alpha-Me R-azide 1,4 triazole (6 carbon) alanine olefin amino acid connected by an all-carbon crosslinker comprising one double bond
  misc_feature (4)..(11): Crosslink between residues
  MOD_RES (11)..(11): Alpha-Me alkyne 1,4 triazole (5 carbon) alanine olefin amino acid connected by an all-carbon crosslinker comprising one double bond
  MOD_RES (15)..(15): D-amino acid
  C-term NH2
ETFAEHWVQLAAALA

SEQ ID NO: 1790 - protein, 15 aa, Artificial Sequence
  Description of Artificial Sequence: Synthetic peptide
  N-term Ac
  MOD_RES (4)..(4): Alpha-Me R-azide 1,4 triazole (6 carbon) alanine olefin amino acid connected by an all-carbon crosslinker comprising one double bond
  misc_feature (4)..(11): Crosslink between residues
  MOD_RES (11)..(11): Alpha-Me alkyne 1,4 triazole (5 carbon) alanine olefin amino acid connected by an all-carbon crosslinker comprising one double bond
  MOD_RES (15)..(15): D-amino acid
  C-term NH2
LTFAAYWAQLAAAAA

SEQ ID NO: 1791 - protein, 15 aa, Artificial Sequence
  Description of Artificial Sequence: Synthetic peptide
  N-term Ac
  MOD_RES (4)..(4): Alpha-Me R-azide 1,4 triazole (6 carbon) alanine olefin amino acid connected by an all-carbon crosslinker comprising one double bond
  misc_feature (4)..(11): Crosslink between residues
  MOD_RES (11)..(11): Alpha-Me alkyne 1,4 triazole (5 carbon) alanine olefin amino acid connected by an all-carbon crosslinker comprising one double bond
  MOD_RES (15)..(15): D-amino acid
  C-term NH2
LTFAAYWAQLAAAAA

SEQ ID NO: 1792 - protein, 15 aa, Artificial Sequence
  Description of Artificial Sequence: Synthetic peptide
  N-term Ac
  MOD_RES (4)..(4): Alpha-Me R-azide 1,4 triazole (6 carbon) alanine olefin amino acid connected by an all-carbon crosslinker comprising one double bond
  misc_feature (4)..(11): Crosslink between residues
  MOD_RES (11)..(11): Alpha-Me alkyne 1,4 triazole (5 carbon) alanine olefin amino acid connected by an all-carbon crosslinker comprising one double bond
  MOD_RES (14)..(14): 2-aminoisobutyric acid
  C-term NH2
LTFAAYWAQLAAAXA

SEQ ID NO: 1793 - protein, 15 aa, Artificial Sequence
  Description of Artificial Sequence: Synthetic peptide
  N-term Ac
  MOD_RES (4)..(4): Alpha-Me R-azide 1,4 triazole (6 carbon) alanine olefin amino acid connected by an all-carbon crosslinker comprising one double bond
  misc_feature (4)..(11): Crosslink between residues
  MOD_RES (11)..(11): Alpha-Me alkyne 1,4 triazole (5 carbon) alanine olefin amino acid connected by an all-carbon crosslinker comprising one double bond
  MOD_RES (14)..(14): 2-aminoisobutyric acid
  C-term NH2
LTFAAYWAQLAAAXA

SEQ ID NO: 1794 - protein, 16 aa, Artificial Sequence
  Description of Artificial Sequence: Synthetic peptide
  N-term Ac
  MOD_RES (4)..(4): Alpha-Me R-azide 1,4 triazole (6 carbon) alanine olefin amino acid connected by an all-carbon crosslinker comprising one double bond
  misc_feature (4)..(11): Crosslink between residues
  MOD_RES (11)..(11): Alpha-Me alkyne 1,4 triazole (5 carbon) alanine olefin amino acid connected by an all-carbon crosslinker comprising one double bond
  MOD_RES (16)..(16): D-amino acid
  C-term NH2
LTFAAYWAQLAAAAAA

SEQ ID NO: 1795 - protein, 15 aa, Artificial Sequence
  Description of Artificial Sequence: Synthetic peptide
  N-term Ac
  MOD_RES (4)..(4): Alpha-Me R5-pentenyl-alanine olefin amino acids connected by an all-carbon crosslinker comprising one double bond
  misc_feature (4)..(11): Crosslink between residues
  MOD_RES (11)..(11): Alpha-Me alkyne 1,4 triazole (5 carbon) alanine olefin amino acid connected by an all-carbon crosslinker comprising one double bonds8
  MOD_RES (15)..(15): D-amino acid
  C-term NH2
LTFAAYWAQLAAAIA

SEQ ID NO: 1796 - protein, 14 aa, Artificial Sequence
  Description of Artificial Sequence: Synthetic peptide
  N-term Ac
  MOD_RES (4)..(4): Alpha-Me R5-pentenyl-alanine olefin amino acids connected by an all-carbon crosslinker comprising one double bond
  misc_feature (4)..(11): Crosslink between residues
  MOD_RES (11)..(11): Alpha-Me alkyne 1,4 triazole (5 carbon) alanine olefin amino acid connected by an all-carbon crosslinker comprising one double bonds8
  C-term NH2
LTFAAYWAQLASAA

SEQ ID NO: 1797 - protein, 15 aa, Artificial Sequence
  Description of Artificial Sequence: Synthetic peptide
  N-term Ac
  MOD_RES (4)..(4): Alpha-Me R-azide 1,4 triazole (6 carbon) alanine olefin amino acid connected by an all-carbon crosslinker comprising one double bond
  misc_feature (4)..(11): Crosslink between residues
  MOD_RES (10)..(10): Cyclobutyl-Ala
  MOD_RES (11)..(11): Alpha-Me alkyne 1,4 triazole (5 carbon) alanine olefin amino acid connected by an all-carbon crosslinker comprising one double bond
  MOD_RES (14)..(14): Norleucine
  C-term NH2
LTFAAYWAQAAAALA

SEQ ID NO: 1798 - protein, 15 aa, Artificial Sequence
  Description of Artificial Sequence: Synthetic peptide
  N-term Ac
  MOD_RES (4)..(4): Alpha-Me R-azide 1,4 triazole (6 carbon) alanine olefin amino acid connected by an all-carbon crosslinker comprising one double bond
  misc_feature (4)..(11): Crosslink between residues
  MOD_RES (10)..(10): Cyclobutyl-Ala
  MOD_RES (11)..(11): Alpha-Me alkyne 1,4 triazole (5 carbon) alanine olefin amino acid connected by an all-carbon crosslinker comprising one double bond
  MOD_RES (14)..(14): Norleucine
  C-term NH2
ETFAAYWAQAAAALA

SEQ ID NO: 1799 - protein, 15 aa, Artificial Sequence
  Description of Artificial Sequence: Synthetic peptide
  N-term Ac
  MOD_RES (4)..(4): Alpha-Me R-azide 1,4 triazole (6 carbon) alanine olefin amino acid connected by an all-carbon crosslinker comprising one double bond
  misc_feature (4)..(11): Crosslink between residues
  MOD_RES (10)..(10): Cyclobutyl-Ala
  MOD_RES (11)..(11): Alpha-Me alkyne 1,4 triazole (5 carbon) alanine olefin amino acid connected by an all-carbon crosslinker comprising one double bond
  MOD_RES (14)..(14): Norleucine
  C-term NH2
LTFAEYWAQAAAALA

SEQ ID NO: 1800 - protein, 15 aa, Artificial Sequence
  Description of Artificial Sequence: Synthetic peptide
  N-term Ac
  MOD_RES (4)..(4): Alpha-Me R-azide 1,4 triazole (6 carbon) alanine olefin amino acid connected by an all-carbon crosslinker comprising one double bond
  misc_feature (4)..(11): Crosslink between residues
  MOD_RES (10)..(10): Cyclobutyl-Ala
  MOD_RES (11)..(11): Alpha-Me alkyne 1,4 triazole (5 carbon) alanine olefin amino acid connected by an all-carbon crosslinker comprising one double bond
  MOD_RES (14)..(14): Norleucine
  C-term NH2
LTFAAYWAQAAAWLA

SEQ ID NO: 1801 - protein, 15 aa, Artificial Sequence
  Description of Artificial Sequence: Synthetic peptide
  N-term Ac
  MOD_RES (4)..(4): Alpha-Me R-azide 1,4 triazole (6 carbon) alanine olefin amino acid connected by an all-carbon crosslinker comprising one double bond
  misc_feature (4)..(11): Crosslink between residues
  MOD_RES (10)..(10): Cyclobutyl-Ala
  MOD_RES (11)..(11): Alpha-Me alkyne 1,4 triazole (5 carbon) alanine olefin amino acid connected by an all-carbon crosslinker comprising one double bond
  MOD_RES (14)..(14): Norleucine
  C-term NH2
ETFAAYWAQAAAWLA

SEQ ID NO: 1802 - protein, 15 aa, Artificial Sequence
  Description of Artificial Sequence: Synthetic peptide
  N-term Ac
  MOD_RES (4)..(4): Alpha-Me R-azide 1,4 triazole (6 carbon) alanine olefin amino acid connected by an all-carbon crosslinker comprising one double bond
  misc_feature (4)..(11): Crosslink between residues
  MOD_RES (10)..(10): Cyclobutyl-Ala
  MOD_RES (11)..(11): Alpha-Me alkyne 1,4 triazole (5 carbon) alanine olefin amino acid connected by an all-carbon crosslinker comprising one double bond
  MOD_RES (14)..(14): Norleucine
  C-term NH2
LTFAEYWAQAAAWLA

SEQ ID NO: 1803 - protein, 15 aa, Artificial Sequence
  Description of Artificial Sequence: Synthetic peptide
  N-term Ac
  MOD_RES (4)..(4): Alpha-Me R-azide 1,4 triazole (6 carbon) alanine olefin amino acid connected by an all-carbon crosslinker comprising one double bond
  misc_feature (4)..(11): Crosslink between residues
  MOD_RES (10)..(10): Cyclobutyl-Ala
  MOD_RES (11)..(11): Alpha-Me alkyne 1,4 triazole (5 carbon) alanine olefin amino acid connected by an all-carbon crosslinker comprising one double bond
  C-term NH2
LTFAEYWAQAASAFA

SEQ ID NO: 1804 - protein, 15 aa, Artificial Sequence
  Description of Artificial Sequence: Synthetic peptide
  N-term Ac
  MOD_RES (3)..(3): 3,4-difluoro-Phe
  MOD_RES (4)..(4): Alpha-Me R-azide 1,4 triazole (6 carbon) alanine olefin amino acid connected by an all-carbon crosslinker comprising one double bond
  misc_feature (4)..(11): Crosslink between residues
  MOD_RES (10)..(10): Cyclobutyl-Ala
  MOD_RES (11)..(11): Alpha-Me alkyne 1,4 triazole (5 carbon) alanine olefin amino acid connected by an all-carbon crosslinker comprising one double bond
  MOD_RES (14)..(14): Norleucine
  C-term NH2
LTFAEYWAQAASALA

SEQ ID NO: 1805 - protein, 15 aa, Artificial Sequence
  Description of Artificial Sequence: Synthetic peptide
  N-term Ac
  MOD_RES (4)..(4): Alpha-Me R-azide 1,4 triazole (6 carbon) alanine olefin amino acid connected by an all-carbon crosslinker comprising one double bond
  misc_feature (4)..(11): Crosslink between residues
  MOD_RES (6)..(6): 4-carboxy-Phe
  MOD_RES (10)..(10): Cyclobutyl-Ala
  MOD_RES (11)..(11): Alpha-Me alkyne 1,4 triazole (5 carbon) alanine olefin amino acid connected by an all-carbon crosslinker comprising one double bond
  MOD_RES (14)..(14): Norleucine
  C-term NH2
LTFAEFWAQAASALA

SEQ ID NO: 1806 - protein, 15 aa, Artificial Sequence
  Description of Artificial Sequence: Synthetic peptide
  N-term Ac
  MOD_RES (4)..(4): Alpha-Me R-azide 1,4 triazole (6 carbon) alanine olefin amino acid connected by an all-carbon crosslinker comprising one double bond
  misc_feature (4)..(11): Crosslink between residues
  MOD_RES (10)..(10): Cyclobutyl-Ala
  MOD_RES (11)..(11): Alpha-Me alkyne 1,4 triazole (5 carbon) alanine olefin amino acid connected by an all-carbon crosslinker comprising one double bond
  MOD_RES (14)..(14): Norleucine
  C-term NH2
LTFAEYWSQAASALA

SEQ ID NO: 1807 - protein, 15 aa, Artificial Sequence
  Description of Artificial Sequence: Synthetic peptide
  N-term Ac
  MOD_RES (4)..(4): Alpha-Me R-azide 1,4 triazole (6 carbon) alanine olefin amino acid connected by an all-carbon crosslinker comprising one double bond
  misc_feature (4)..(11): Crosslink between residues
  MOD_RES (10)..(10): Cyclobutyl-Ala
  MOD_RES (11)..(11): Alpha-Me alkyne 1,4 triazole (5 carbon) alanine olefin amino acid connected by an all-carbon crosslinker comprising one double bond
  MOD_RES (14)..(14): Norleucine
  C-term NH2
LTFAEYWWQAASALA

SEQ ID NO: 1808 - protein, 15 aa, Artificial Sequence
  Description of Artificial Sequence: Synthetic peptide
  N-term Ac
  MOD_RES (4)..(4): Alpha-Me R-azide 1,4 triazole (6 carbon) alanine olefin amino acid connected by an all-carbon crosslinker comprising one double bond
  misc_feature (4)..(11): Crosslink between residues
  MOD_RES (10)..(10): Cyclobutyl-Ala
  MOD_RES (11)..(11): Alpha-Me alkyne 1,4 triazole (5 carbon) alanine olefin amino acid connected by an all-carbon crosslinker comprising one double bond
  MOD_RES (15)..(15): D-amino acid
  C-term NH2
LTFAEYWAQAAAAIA

SEQ ID NO: 1809 - protein, 15 aa, Artificial Sequence
  Description of Artificial Sequence: Synthetic peptide
  N-term Ac
  MOD_RES (3)..(3): 3,4-difluoro-Phe
  MOD_RES (4)..(4): Alpha-Me R-azide 1,4 triazole (6 carbon) alanine olefin amino acid connected by an all-carbon crosslinker comprising one double bond
  misc_feature (4)..(11): Crosslink between residues
  MOD_RES (10)..(10): Cyclobutyl-Ala
  MOD_RES (11)..(11): Alpha-Me alkyne 1,4 triazole (5 carbon) alanine olefin amino acid connected by an all-carbon crosslinker comprising one double bond
  MOD_RES (15)..(15): D-amino acid
  C-term NH2
LTFAEYWAQAAAAIA

SEQ ID NO: 1810 - protein, 15 aa, Artificial Sequence
  Description of Artificial Sequence: Synthetic peptide
  N-term Ac
  MOD_RES (4)..(4): Alpha-Me R-azide 1,4 triazole (6 carbon) alanine olefin amino acid connected by an all-carbon crosslinker comprising one double bond
  misc_feature (4)..(11): Crosslink between residues
  MOD_RES (6)..(6): 4-carboxy-Phe
  MOD_RES (10)..(10): Cyclobutyl-Ala
  MOD_RES (11)..(11): Alpha-Me alkyne 1,4 triazole (5 carbon) alanine olefin amino acid connected by an all-carbon crosslinker comprising one double bond
  MOD_RES (15)..(15): D-amino acid
  C-term NH2
LTFAEFWAQAAAAIA

SEQ ID NO: 1811 - protein, 14 aa, Artificial Sequence
  Description of Artificial Sequence: Synthetic peptide
  N-term Pam
  MOD_RES (4)..(4): Alpha-Me R-azide 1,4 triazole (6 carbon) alanine olefin amino acid connected by an all-carbon crosslinker comprising one double bond
  misc_feature (4)..(11): Crosslink between residues
  MOD_RES (10)..(10): Cyclobutyl-Ala
  MOD_RES (11)..(11): Alpha-Me alkyne 1,4 triazole (5 carbon) alanine olefin amino acid connected by an all-carbon crosslinker comprising one double bond
  C-term NH2
ETFAEYWAQAASAA

SEQ ID NO: 1812 - protein, 14 aa, Artificial Sequence
  Description of Artificial Sequence: Synthetic peptide
  N-term Ac
  MOD_RES (3)..(3): homo-Phe
  MOD_RES (4)..(4): Alpha-Me R-azide 1,4 triazole (6 carbon) alanine olefin amino acid connected by an all-carbon crosslinker comprising one double bond
  misc_feature (4)..(11): Crosslink between residues
  MOD_RES (10)..(10): Cyclobutyl-Ala
  MOD_RES (11)..(11): Alpha-Me alkyne 1,4 triazole (5 carbon) alanine olefin amino acid connected by an all-carbon crosslinker comprising one double bond
  C-term NH2
LTFAEFWAQAASAA

SEQ ID NO: 1813 - protein, 14 aa, Artificial Sequence
  Description of Artificial Sequence: Synthetic peptide
  N-term Ac
  MOD_RES (4)..(4): Alpha-Me R-azide 1,4 triazole (6 carbon) alanine olefin amino acid connected by an all-carbon crosslinker comprising one double bond
  misc_feature (4)..(11): Crosslink between residues
  MOD_RES (10)..(10): Cyclobutyl-Ala
  MOD_RES (11)..(11): Alpha-Me alkyne 1,4 triazole (5 carbon) alanine olefin amino acid connected by an all-carbon crosslinker comprising one double bond
  C-term NH2
LTAAEYWAQAASAA

SEQ ID NO: 1814 - protein, 14 aa, Artificial Sequence
  Description of Artificial Sequence: Synthetic peptide
  N-term Ac
  MOD_RES (4)..(4): Alpha-Me R-azide 1,4 triazole (6 carbon) alanine olefin amino acid connected by an all-carbon crosslinker comprising one double bond
  misc_feature (4)..(11): Crosslink between residues
  MOD_RES (10)..(10): Cyclobutyl-Ala
  MOD_RES (11)..(11): Alpha-Me alkyne 1,4 triazole (5 carbon) alanine olefin amino acid connected by an all-carbon crosslinker comprising one double bond
  C-term NH2
LTFAEYAAQAASAA

SEQ ID NO: 1815 - protein, 14 aa, Artificial Sequence
  Description of Artificial Sequence: Synthetic peptide
  N-term Ac
  MOD_RES (4)..(4): Alpha-Me R-azide 1,4 triazole (6 carbon) alanine olefin amino acid connected by an all-carbon crosslinker comprising one double bond
  misc_feature (4)..(11): Crosslink between residues
  MOD_RES (7)..(7): 2Nal
  MOD_RES (10)..(10): Cyclobutyl-Ala
  MOD_RES (11)..(11): Alpha-Me alkyne 1,4 triazole (5 carbon) alanine olefin amino acid connected by an all-carbon crosslinker comprising one double bond
  C-term NH2
LTFAEYAAQAASAA

SEQ ID NO: 1816 - protein, 14 aa, Artificial Sequence
  Description of Artificial Sequence: Synthetic peptide
  N-term Ac
  MOD_RES (4)..(4): Alpha-Me R-azide 1,4 triazole (6 carbon) alanine olefin amino acid connected by an all-carbon crosslinker comprising one double bond
  misc_feature (4)..(11): Crosslink between residues
  MOD_RES (10)..(10): Cyclobutyl-Ala
  MOD_RES (11)..(11): Alpha-Me alkyne 1,4 triazole (5 carbon) alanine olefin amino acid connected by an all-carbon crosslinker comprising one double bond
  C-term NH2
LTFAAYWAQAASAA

SEQ ID NO: 1817 - protein, 14 aa, Artificial Sequence
  Description of Artificial Sequence: Synthetic peptide
  N-term Ac
  MOD_RES (4)..(4): Alpha-Me R-azide 1,4 triazole (6 carbon) alanine olefin amino acid connected by an all-carbon crosslinker comprising one double bond
  misc_feature (4)..(11): Crosslink between residues
  MOD_RES (10)..(10): Cyclobutyl-Ala
  MOD_RES (11)..(11): Alpha-Me alkyne 1,4 triazole (5 carbon) alanine olefin amino acid connected by an all-carbon crosslinker comprising one double bond
  C-term NH2
LTFAEYWAQAASAF

SEQ ID NO: 1818 - protein, 15 aa, Artificial Sequence
  Description of Artificial Sequence: Synthetic peptide
  N-term Ac
  MOD_RES (4)..(4): Alpha-Me R-azide 1,4 triazole (6 carbon) alanine olefin amino acid connected by an all-carbon crosslinker comprising one double bond
  misc_feature (4)..(11): Crosslink between residues
  MOD_RES (10)..(10): Cyclobutyl-Ala
  MOD_RES (11)..(11): Alpha-Me alkyne 1,4 triazole (5 carbon) alanine olefin amino acid connected by an all-carbon crosslinker comprising one double bond
  MOD_RES (15)..(15): D-amino acid
  C-term NH2
LTFAEYWAQAASAFA

SEQ ID NO: 1819 - protein, 14 aa, Artificial Sequence
  Description of Artificial Sequence: Synthetic peptide
  N-term Ac
  MOD_RES (4)..(4): Alpha-Me R-azide 1,4 triazole (6 carbon) alanine olefin amino acid connected by an all-carbon crosslinker comprising one double bond
  misc_feature (4)..(11): Crosslink between residues
  MOD_RES (10)..(10): Cyclobutyl-Ala
  MOD_RES (11)..(11): Alpha-Me alkyne 1,4 triazole (5 carbon) alanine olefin amino acid connected by an all-carbon crosslinker comprising one double bond
  C-term NH2
LTFAAYWAQAASAF

SEQ ID NO: 1820 - protein, 14 aa, Artificial Sequence
  Description of Artificial Sequence: Synthetic peptide
  N-term Ac
  MOD_RES (3)..(3): 3,4-difluoro-Phe
  MOD_RES (4)..(4): Alpha-Me R-azide 1,4 triazole (6 carbon) alanine olefin amino acid connected by an all-carbon crosslinker comprising one double bond
  misc_feature (4)..(11): Crosslink between residues
  MOD_RES (10)..(10): Cyclobutyl-Ala
  MOD_RES (11)..(11): Alpha-Me alkyne 1,4 triazole (5 carbon) alanine olefin amino acid connected by an all-carbon crosslinker comprising one double bond
  C-term NH2
LTFAAYWAQAASAF

SEQ ID NO: 1821 - protein, 14 aa, Artificial Sequence
  Description of Artificial Sequence: Synthetic peptide
  N-term Ac
  MOD_RES (4)..(4): Alpha-Me R-azide 1,4 triazole (6 carbon) alanine olefin amino acid connected by an all-carbon crosslinker comprising one double bond
  misc_feature (4)..(11): Crosslink between residues
  MOD_RES (6)..(6): 4-carboxy-Phe
  MOD_RES (10)..(10): Cyclobutyl-Ala
  MOD_RES (11)..(11): Alpha-Me alkyne 1,4 triazole (5 carbon) alanine olefin amino acid connected by an all-carbon crosslinker comprising one double bond
  C-term NH2
LTFAAFWAQAASAF

SEQ ID NO: 1822 - protein, 14 aa, Artificial Sequence
  Description of Artificial Sequence: Synthetic peptide
  N-term Ac
  MOD_RES (4)..(4): Alpha-Me R-azide 1,4 triazole (6 carbon) alanine olefin amino acid connected by an all-carbon crosslinker comprising one double bond
  misc_feature (4)..(11): Crosslink between residues
  MOD_RES (7)..(7): 6cl-Trp
  MOD_RES (10)..(10): Cyclobutyl-Ala
  MOD_RES (11)..(11): Alpha-Me alkyne 1,4 triazole (5 carbon) alanine olefin amino acid connected by an all-carbon crosslinker comprising one double bond
  C-term NH2
LTFAEYWAQAASAF

SEQ ID NO: 1823 - protein, 14 aa, Artificial Sequence
  Description of Artificial Sequence: Synthetic peptide
  N-term Ac
  MOD_RES (4)..(4): Alpha-Me R-azide 1,4 triazole (6 carbon) alanine olefin amino acid connected by an all-carbon crosslinker comprising one double bond
  misc_feature (4)..(11): Crosslink between residues
  MOD_RES (10)..(10): Cyclobutyl-Ala
  MOD_RES (11)..(11): Alpha-Me alkyne 1,4 triazole (5 carbon) alanine olefin amino acid connected by an all-carbon crosslinker comprising one double bond
  C-term NH2
LTFAAYWSQAASAF

SEQ ID NO: 1824 - protein, 14 aa, Artificial Sequence
  Description of Artificial Sequence: Synthetic peptide
  N-term Ac
  MOD_RES (4)..(4): Alpha-Me R-azide 1,4 triazole (6 carbon) alanine olefin amino acid connected by an all-carbon crosslinker comprising one double bond
  misc_feature (4)..(11): Crosslink between residues
  MOD_RES (10)..(10): Cyclobutyl-Ala
  MOD_RES (11)..(11): Alpha-Me alkyne 1,4 triazole (5 carbon) alanine olefin amino acid connected by an all-carbon crosslinker comprising one double bond
  C-term NH2
LTFAAYWWQAASAF

SEQ ID NO: 1825 - protein, 15 aa, Artificial Sequence
  Description of Artificial Sequence: Synthetic peptide
  N-term Ac
  MOD_RES (4)..(4): Alpha-Me R-azide 1,4 triazole (6 carbon) alanine olefin amino acid connected by an all-carbon crosslinker comprising one double bond
  misc_feature (4)..(11): Crosslink between residues
  MOD_RES (10)..(10): Cyclobutyl-Ala
  MOD_RES (11)..(11): Alpha-Me alkyne 1,4 triazole (5 carbon) alanine olefin amino acid connected by an all-carbon crosslinker comprising one double bond
  MOD_RES (15)..(15): D-amino acid
  C-term NH2
LTFAAYWAQAAAAIA

SEQ ID NO: 1826 - protein, 15 aa, Artificial Sequence
  Description of Artificial Sequence: Synthetic peptide
  N-term Ac
  MOD_RES (3)..(3): 3,4-difluoro-Phe
  MOD_RES (4)..(4): Alpha-Me R-azide 1,4 triazole (6 carbon) alanine olefin amino acid connected by an all-carbon crosslinker comprising one double bond
  misc_feature (4)..(11): Crosslink between residues
  MOD_RES (10)..(10): Cyclobutyl-Ala
  MOD_RES (11)..(11): Alpha-Me alkyne 1,4 triazole (5 carbon) alanine olefin amino acid connected by an all-carbon crosslinker comprising one double bond
  MOD_RES (15)..(15): D-amino acid
  C-term NH2
LTFAAYWAQAAAAIA

SEQ ID NO: 1827 - protein, 15 aa, Artificial Sequence
  Description of Artificial Sequence: Synthetic peptide
  N-term Ac
  MOD_RES (4)..(4): Alpha-Me R-azide 1,4 triazole (6 carbon) alanine olefin amino acid connected by an all-carbon crosslinker comprising one double bond
  misc_feature (4)..(11): Crosslink between residues
  MOD_RES (7)..(7): 6cl-Trp
  MOD_RES (10)..(10): Cyclobutyl-Ala
  MOD_RES (11)..(11): Alpha-Me alkyne 1,4 triazole (5 carbon) alanine olefin amino acid connected by an all-carbon crosslinker comprising one double bond
  MOD_RES (15)..(15): D-amino acid
  C-term NH2
LTFAAYWAQAAAAIA

SEQ ID NO: 1828 - protein, 15 aa, Artificial Sequence
  Description of Artificial Sequence: Synthetic peptide
  N-term Ac
  MOD_RES (4)..(4): Alpha-Me R-azide 1,4 triazole (6 carbon) alanine olefin amino acid connected by an all-carbon crosslinker comprising one double bond
  misc_feature (4)..(11): Crosslink between residues
  MOD_RES (6)..(6): 4-carboxy-Phe
  MOD_RES (10)..(10): Cyclobutyl-Ala
  MOD_RES (11)..(11): Alpha-Me alkyne 1,4 triazole (5 carbon) alanine olefin amino acid connected by an all-carbon crosslinker comprising one double bond
  MOD_RES (15)..(15): D-amino acid
  C-term NH2
LTFAAFWAQAAAAIA

SEQ ID NO: 1829 - protein, 15 aa, Artificial Sequence
  Description of Artificial Sequence: Synthetic peptide
  N-term Ac
  MOD_RES (4)..(4): Alpha-Me R-azide 1,4 triazole (6 carbon) alanine olefin amino acid connected by an all-carbon crosslinker comprising one double bond
  misc_feature (4)..(11): Crosslink between residues
  MOD_RES (10)..(10): Cyclobutyl-Ala
  MOD_RES (11)..(11): Alpha-Me alkyne 1,4 triazole (5 carbon) alanine olefin amino acid connected by an all-carbon crosslinker comprising one double bond
  MOD_RES (15)..(15): D-amino acid
  C-term NH2
LTFAEYWAQAAAAFA

SEQ ID NO: 1830 - protein, 15 aa, Artificial Sequence
  Description of Artificial Sequence: Synthetic peptide
  N-term Ac
  MOD_RES (4)..(4): Alpha-Me R-azide 1,4 triazole (6 carbon) alanine olefin amino acid connected by an all-carbon crosslinker comprising one double bond
  misc_feature (4)..(11): Crosslink between residues
  MOD_RES (10)..(10): Cyclobutyl-Ala
  MOD_RES (11)..(11): Alpha-Me alkyne 1,4 triazole (5 carbon) alanine olefin amino acid connected by an all-carbon crosslinker comprising one double bond
  MOD_RES (15)..(15): D-amino acid
  C-term NH2
LTFAEYWAQAAAAFA

SEQ ID NO: 1831 - protein, 15 aa, Artificial Sequence
  Description of Artificial Sequence: Synthetic peptide
  N-term Ac
  MOD_RES (4)..(4): Alpha-Me R-azide 1,4 triazole (6 carbon) alanine olefin amino acid connected by an all-carbon crosslinker comprising one double bond
  misc_feature (4)..(11): Crosslink between residues
  MOD_RES (10)..(10): Cyclobutyl-Ala
  MOD_RES (11)..(11): Alpha-Me alkyne 1,4 triazole (5 carbon) alanine olefin amino acid connected by an all-carbon crosslinker comprising one double bond
  MOD_RES (14)..(14): Norleucine
  MOD_RES (15)..(15): D-amino acid
  C-term NH2
ETFAAYWAQAAAWLA

SEQ ID NO: 1832 - protein, 15 aa, Artificial Sequence
  Description of Artificial Sequence: Synthetic peptide
  N-term Ac
  MOD_RES (4)..(4): Alpha-Me R-azide 1,4 triazole (6 carbon) alanine olefin amino acid connected by an all-carbon crosslinker comprising one double bond
  misc_feature (4)..(11): Crosslink between residues
  MOD_RES (10)..(10): Cyclobutyl-Ala
  MOD_RES (11)..(11): Alpha-Me alkyne 1,4 triazole (5 carbon) alanine olefin amino acid connected by an all-carbon crosslinker comprising one double bond
  MOD_RES (14)..(14): Norleucine
  MOD_RES (15)..(15): D-amino acid
  C-term NH2
LTFAEYWAQAAAWLA

SEQ ID NO: 1833 - protein, 15 aa, Artificial Sequence
  Description of Artificial Sequence: Synthetic peptide
  N-term Ac
  MOD_RES (4)..(4): Alpha-Me R-azide 1,4 triazole (6 carbon) alanine olefin amino acid connected by an all-carbon crosslinker comprising one double bond
  misc_feature (4)..(11): Crosslink between residues
  MOD_RES (10)..(10): Cyclobutyl-Ala
  MOD_RES (11)..(11): Alpha-Me alkyne 1,4 triazole (5 carbon) alanine olefin amino acid connected by an all-carbon crosslinker comprising one double bond
  MOD_RES (14)..(14): Norleucine
  MOD_RES (15)..(15): D-amino acid
  C-term NH2
ETFAEYWAQAAAWLA

SEQ ID NO: 1834 - protein, 15 aa, Artificial Sequence
  Description of Artificial Sequence: Synthetic peptide
  N-term Ac
  MOD_RES (4)..(4): Alpha-Me R-azide 1,4 triazole (6 carbon) alanine olefin amino acid connected by an all-carbon crosslinker comprising one double bond
  misc_feature (4)..(11): Crosslink between residues
  MOD_RES (10)..(10): Cyclobutyl-Ala
  MOD_RES (11)..(11): Alpha-Me alkyne 1,4 triazole (5 carbon) alanine olefin amino acid connected by an all-carbon crosslinker comprising one double bond
  MOD_RES (14)..(14): Norleucine
  MOD_RES (15)..(15): D-amino acid
  C-term NH2
ETFAEYWAQAAAWLA

SEQ ID NO: 1835 - protein, 15 aa, Artificial Sequence
  Description of Artificial Sequence: Synthetic peptide
  N-term Ac
  MOD_RES (4)..(4): Alpha-Me R-azide 1,4 triazole (6 carbon) alanine olefin amino acid connected by an all-carbon crosslinker comprising one double bond
  misc_feature (4)..(11): Crosslink between residues
  MOD_RES (10)..(10): Cyclobutyl-Ala
  MOD_RES (11)..(11): Alpha-Me alkyne 1,4 triazole (5 carbon) alanine olefin amino acid connected by an all-carbon crosslinker comprising one double bond
  MOD_RES (15)..(15): D-amino acid
  C-term NH2
LTFAAYWAQAASAFA

SEQ ID NO: 1836 - protein, 15 aa, Artificial Sequence
  Description of Artificial Sequence: Synthetic peptide
  N-term Ac
  MOD_RES (4)..(4): Alpha-Me R-azide 1,4 triazole (6 carbon) alanine olefin amino acid connected by an all-carbon crosslinker comprising one double bond
  misc_feature (4)..(11): Crosslink between residues
  MOD_RES (10)..(10): Cyclobutyl-Ala
  MOD_RES (11)..(11): Alpha-Me alkyne 1,4 triazole (5 carbon) alanine olefin amino acid connected by an all-carbon crosslinker comprising one double bond
  MOD_RES (15)..(15): D-amino acid
  C-term NH2
LTFAAYWAQAASAFA

SEQ ID NO: 1837 - protein, 15 aa, Artificial Sequence
  Description of Artificial Sequence: Synthetic peptide
  N-term Ac
  MOD_RES (4)..(4): Alpha-Me R-azide 1,4 triazole (6 carbon) alanine olefin amino acid connected by an all-carbon crosslinker comprising one double bond
  misc_feature (4)..(11): Crosslink between residues
  MOD_RES (11)..(11): Alpha-Me alkyne 1,4 triazole (5 carbon) alanine olefin amino acid connected by an all-carbon crosslinker comprising one double bond
  MOD_RES (14)..(14): Norleucine
  MOD_RES (15)..(15): D-amino acid
  C-term NH2
ETFAAYWAQLAAWLA

SEQ ID NO: 1838 - protein, 15 aa, Artificial Sequence
  Description of Artificial Sequence: Synthetic peptide
  N-term Ac
  MOD_RES (4)..(4): Alpha-Me R-azide 1,4 triazole (6 carbon) alanine olefin amino acid connected by an all-carbon crosslinker comprising one double bond
  misc_feature (4)..(11): Crosslink between residues
  MOD_RES (11)..(11): Alpha-Me alkyne 1,4 triazole (5 carbon) alanine olefin amino acid connected by an all-carbon crosslinker comprising one double bond
  MOD_RES (14)..(14): Norleucine
  MOD_RES (15)..(15): D-amino acid
  C-term NH2
LTFAEYWAQLAAWLA

SEQ ID NO: 1839 - protein, 15 aa, Artificial Sequence
  Description of Artificial Sequence: Synthetic peptide
  N-term Ac
  MOD_RES (4)..(4): Alpha-Me R-azide 1,4 triazole (6 carbon) alanine olefin amino acid connected by an all-carbon crosslinker comprising one double bond
  misc_feature (4)..(11): Crosslink between residues
  MOD_RES (11)..(11): Alpha-Me alkyne 1,4 triazole (5 carbon) alanine olefin amino acid connected by an all-carbon crosslinker comprising one double bond
  MOD_RES (14)..(14): Norleucine
  MOD_RES (15)..(15): D-amino acid
  C-term NH2
ETFAEYWAQLAAWLA

SEQ ID NO: 1840 - protein, 14 aa, Artificial Sequence
  Description of Artificial Sequence: Synthetic peptide
  N-term Dmaac
  MOD_RES (4)..(4): Alpha-Me R-azide 1,4 triazole (6 carbon) alanine olefin amino acid connected by an all-carbon crosslinker comprising one double bond
  misc_feature (4)..(11): Crosslink between residues
  MOD_RES (10)..(10): homo-Leu
  MOD_RES (11)..(11): Alpha-Me alkyne 1,4 triazole (5 carbon) alanine olefin amino acid connected by an all-carbon crosslinker comprising one double bond
  C-term NH2
LTFAEYWAQLASAA

SEQ ID NO: 1841 - protein, 14 aa, Artificial Sequence
  Description of Artificial Sequence: Synthetic peptide
  N-term Hexac
  MOD_RES (4)..(4): Alpha-Me R-azide 1,4 triazole (6 carbon) alanine olefin amino acid connected by an all-carbon crosslinker comprising one double bond
  misc_feature (4)..(11): Crosslink between residues
  MOD_RES (10)..(10): homo-Leu
  MOD_RES (11)..(11): Alpha-Me alkyne 1,4 triazole (5 carbon) alanine olefin amino acid connected by an all-carbon crosslinker comprising one double bond
  C-term NH2
LTFAEYWAQLASAA

SEQ ID NO: 1842 - protein, 14 aa, Artificial Sequence
  Description of Artificial Sequence: Synthetic peptide
  N-term Napac
  MOD_RES (4)..(4): Alpha-Me R-azide 1,4 triazole (6 carbon) alanine olefin amino acid connected by an all-carbon crosslinker comprising one double bond
  misc_feature (4)..(11): Crosslink between residues
  MOD_RES (10)..(10): homo-Leu
  MOD_RES (11)..(11): Alpha-Me alkyne 1,4 triazole (5 carbon) alanine olefin amino acid connected by an all-carbon crosslinker comprising one double bond
  C-term NH2
LTFAEYWAQLASAA

SEQ ID NO: 1843 - protein, 14 aa, Artificial Sequence
  Description of Artificial Sequence: Synthetic peptide
  N-term Decac
  MOD_RES (4)..(4): Alpha-Me R-azide 1,4 triazole (6 carbon) alanine olefin amino acid connected by an all-carbon crosslinker comprising one double bond
  misc_feature (4)..(11): Crosslink between residues
  MOD_RES (10)..(10): homo-Leu
  MOD_RES (11)..(11): Alpha-Me alkyne 1,4 triazole (5 carbon) alanine olefin amino acid connected by an all-carbon crosslinker comprising one double bond
  C-term NH2
LTFAEYWAQLASAA

SEQ ID NO: 1844 - protein, 14 aa, Artificial Sequence
  Description of Artificial Sequence: Synthetic peptide
  N-term Admac
  MOD_RES (4)..(4): Alpha-Me R-azide 1,4 triazole (6 carbon) alanine olefin amino acid connected by an all-carbon crosslinker comprising one double bond
  misc_feature (4)..(11): Crosslink between residues
  MOD_RES (10)..(10): homo-Leu
  MOD_RES (11)..(11): Alpha-Me alkyne 1,4 triazole (5 carbon) alanine olefin amino acid connected by an all-carbon crosslinker comprising one double bond
  C-term NH2
LTFAEYWAQLASAA

SEQ ID NO: 1845 - protein, 14 aa, Artificial Sequence
  Description of Artificial Sequence: Synthetic peptide
  N-term Tmac
  MOD_RES (4)..(4): Alpha-Me R-azide 1,4 triazole (6 carbon) alanine olefin amino acid connected by an all-carbon crosslinker comprising one double bond
  misc_feature (4)..(11): Crosslink between residues
  MOD_RES (10)..(10): homo-Leu
  MOD_RES (11)..(11): Alpha-Me alkyne 1,4 triazole (5 carbon) alanine olefin amino acid connected by an all-carbon crosslinker comprising one double bond
  C-term NH2
LTFAEYWAQLASAA

SEQ ID NO: 1846 - protein, 14 aa, Artificial Sequence
  Description of Artificial Sequence: Synthetic peptide
  N-term Pam
  MOD_RES (4)..(4): Alpha-Me R-azide 1,4 triazole (6 carbon) alanine olefin amino acid connected by an all-carbon crosslinker comprising one double bond
  misc_feature (4)..(11): Crosslink between residues
  MOD_RES (10)..(10): homo-Leu
  MOD_RES (11)..(11): Alpha-Me alkyne 1,4 triazole (5 carbon) alanine olefin amino acid connected by an all-carbon crosslinker comprising one double bond
  C-term NH2
LTFAEYWAQLASAA

SEQ ID NO: 1847 - protein, 15 aa, Artificial Sequence
  Description of Artificial Sequence: Synthetic peptide
  N-term Ac
  MOD_RES (4)..(4): Alpha-Me R-azide 1,4 triazole (6 carbon) alanine olefin amino acid connected by an all-carbon crosslinker comprising one double bond
  misc_feature (4)..(11): Crosslink between residues
  MOD_RES (10)..(10): Cyclobutyl-Ala
  MOD_RES (11)..(11): Alpha-Me alkyne 1,4 triazole (5 carbon) alanine olefin amino acid connected by an all-carbon crosslinker comprising one double bond
  MOD_RES (14)..(14): Norleucine
  C-term NH2
LTFAAYWAQAAAALA

SEQ ID NO: 1848 - protein, 15 aa, Artificial Sequence
  Description of Artificial Sequence: Synthetic peptide
  N-term Ac
  MOD_RES (3)..(3): 3,4-difluoro-Phe
  MOD_RES (4)..(4): Alpha-Me R-azide 1,4 triazole (6 carbon) alanine olefin amino acid connected by an all-carbon crosslinker comprising one double bond
  misc_feature (4)..(11): Crosslink between residues
  MOD_RES (10)..(10): Cyclobutyl-Ala
  MOD_RES (11)..(11): Alpha-Me alkyne 1,4 triazole (5 carbon) alanine olefin amino acid connected by an all-carbon crosslinker comprising one double bond
  MOD_RES (15)..(15): D-amino acid
  C-term NH2
LTFAEYWAQAAAAIA

SEQ ID NO: 1849 - protein, 14 aa, Artificial Sequence
  Description of Artificial Sequence: Synthetic peptide
  N-term Ac
  MOD_RES (3)..(3): 3,4-difluoro-Phe
  MOD_RES (4)..(4): Alpha-Me R-azide 1,4 triazole (6 carbon) alanine olefin amino acid connected by an all-carbon crosslinker comprising one double bond
  misc_feature (4)..(11): Crosslink between residues
  MOD_RES (10)..(10): Cyclobutyl-Ala
  MOD_RES (11)..(11): Alpha-Me alkyne 1,4 triazole (5 carbon) alanine olefin amino acid connected by an all-carbon crosslinker comprising one double bond
  C-term NH2
LTFAEYWAQAASAA

SEQ ID NO: 1850 - protein, 14 aa, Artificial Sequence
  Description of Artificial Sequence: Synthetic peptide
  N-term Ac
  MOD_RES (3)..(3): 3,4-difluoro-Phe
  MOD_RES (4)..(4): Alpha-Me R-azide 1,4 triazole (6 carbon) alanine olefin amino acid connected by an all-carbon crosslinker comprising one double bond
  misc_feature (4)..(11): Crosslink between residues
  MOD_RES (10)..(10): Cyclobutyl-Ala
  MOD_RES (11)..(11): Alpha-Me alkyne 1,4 triazole (5 carbon) alanine olefin amino acid connected by an all-carbon crosslinker comprising one double bond
  C-term NH2
LTFAEYWAQAASAA

SEQ ID NO: 1851 - protein, 14 aa, Artificial Sequence
  Description of Artificial Sequence: Synthetic peptide
  N-term Ac
  MOD_RES (4)..(4): Alpha-Me R-azide 1,4 triazole (6 carbon) alanine olefin amino acid connected by an all-carbon crosslinker comprising one double bond
  misc_feature (4)..(11): Crosslink between residues
  MOD_RES (6)..(6): 4-carboxy-Phe
  MOD_RES (10)..(10): Cyclobutyl-Ala
  MOD_RES (11)..(11): Alpha-Me alkyne 1,4 triazole (5 carbon) alanine olefin amino acid connected by an all-carbon crosslinker comprising one double bond
  C-term NH2
LTFAEFWAQAASAA

SEQ ID NO: 1852 - protein, 14 aa, Artificial Sequence
  Description of Artificial Sequence: Synthetic peptide
  N-term Ac
  MOD_RES (4)..(4): Alpha-Me R-azide 1,4 triazole (6 carbon) alanine olefin amino acid connected by an all-carbon crosslinker comprising one double bond
  misc_feature (4)..(11): Crosslink between residues
  MOD_RES (6)..(6): 4-carboxy-Phe
  MOD_RES (10)..(10): Cyclobutyl-Ala
  MOD_RES (11)..(11): Alpha-Me alkyne 1,4 triazole (5 carbon) alanine olefin amino acid connected by an all-carbon crosslinker comprising one double bond
  C-term NH2
LTFAEFWAQAASAA

SEQ ID NO: 1853 - protein, 14 aa, Artificial Sequence
  Description of Artificial Sequence: Synthetic peptide
  N-term Ac
  MOD_RES (4)..(4): Alpha-Me R-azide 1,4 triazole (6 carbon) alanine olefin amino acid connected by an all-carbon crosslinker comprising one double bond
  misc_feature (4)..(11): Crosslink between residues
  MOD_RES (10)..(10): Cyclobutyl-Ala
  MOD_RES (11)..(11): Alpha-Me alkyne 1,4 triazole (5 carbon) alanine olefin amino acid connected by an all-carbon crosslinker comprising one double bond
  C-term NH2
LTFAEYWSQAASAA

SEQ ID NO: 1854 - protein, 14 aa, Artificial Sequence
  Description of Artificial Sequence: Synthetic peptide
  N-term Ac
  MOD_RES (4)..(4): Alpha-Me R-azide 1,4 triazole (6 carbon) alanine olefin amino acid connected by an all-carbon crosslinker comprising one double bond
  misc_feature (4)..(11): Crosslink between residues
  MOD_RES (10)..(10): Cyclobutyl-Ala
  MOD_RES (11)..(11): Alpha-Me alkyne 1,4 triazole (5 carbon) alanine olefin amino acid connected by an all-carbon crosslinker comprising one double bond
  C-term NH2
LTFAEYWSQAASAA

SEQ ID NO: 1855 - protein, 14 aa, Artificial Sequence
  Description of Artificial Sequence: Synthetic peptide
  N-term Ac
  MOD_RES (4)..(4): Alpha-Me R-azide 1,4 triazole (6 carbon) alanine olefin amino acid connected by an all-carbon crosslinker comprising one double bond
  misc_feature (4)..(11): Crosslink between residues
  MOD_RES (10)..(10): homo-Leu
  MOD_RES (11)..(11): Alpha-Me alkyne 1,4 triazole (5 carbon) alanine olefin amino acid connected by an all-carbon crosslinker comprising one double bond
  C-term NH2
LTFAEYWAQLASAA

SEQ ID NO: 1856 - protein, 14 aa, Artificial Sequence
  Description of Artificial Sequence: Synthetic peptide
  N-term Ac
  MOD_RES (4)..(4): Alpha-Me R-azide 1,4 triazole (6 carbon) alanine olefin amino acid connected by an all-carbon crosslinker comprising one double bond
  misc_feature (4)..(11): Crosslink between residues
  MOD_RES (10)..(10): homo-Leu
  MOD_RES (11)..(11): Alpha-Me alkyne 1,4 triazole (5 carbon) alanine olefin amino acid connected by an all-carbon crosslinker comprising one double bond
  C-term NH2
LTFAAYWAQLASAF

SEQ ID NO: 1857 - protein, 14 aa, Artificial Sequence
  Description of Artificial Sequence: Synthetic peptide
  N-term Ac
  MOD_RES (4)..(4): Alpha-Me R-azide 1,4 triazole (6 carbon) alanine olefin amino acid connected by an all-carbon crosslinker comprising one double bond
  misc_feature (4)..(11): Crosslink between residues
  MOD_RES (10)..(10): homo-Leu
  MOD_RES (11)..(11): Alpha-Me alkyne 1,4 triazole (5 carbon) alanine olefin amino acid connected by an all-carbon crosslinker comprising one double bond
  C-term NH2
LTFAAYWAQLASAF

SEQ ID NO: 1858 - protein, 14 aa, Artificial Sequence
  Description of Artificial Sequence: Synthetic peptide
  N-term Ac
  MOD_RES (3)..(3): 3,4-difluoro-Phe
  MOD_RES (4)..(4): Alpha-Me R-azide 1,4 triazole (6 carbon) alanine olefin amino acid connected by an all-carbon crosslinker comprising one double bond
  misc_feature (4)..(11): Crosslink between residues
  MOD_RES (10)..(10): homo-Leu
  MOD_RES (11)..(11): Alpha-Me alkyne 1,4 triazole (5 carbon) alanine olefin amino acid connected by an all-carbon crosslinker comprising one double bond
  C-term NH2
LTFAAYWAQLASAA

SEQ ID NO: 1859 - protein, 14 aa, Artificial Sequence
  Description of Artificial Sequence: Synthetic peptide
  N-term Ac
  MOD_RES (3)..(3): 3,4-difluoro-Phe
  MOD_RES (4)..(4): Alpha-Me R-azide 1,4 triazole (6 carbon) alanine olefin amino acid connected by an all-carbon crosslinker comprising one double bond
  misc_feature (4)..(11): Crosslink between residues
  MOD_RES (10)..(10): homo-Leu
  MOD_RES (11)..(11): Alpha-Me alkyne 1,4 triazole (5 carbon) alanine olefin amino acid connected by an all-carbon crosslinker comprising one double bond
  C-term NH2
LTFAAYWAQLASAA

SEQ ID NO: 1860 - protein, 14 aa, Artificial Sequence
  Description of Artificial Sequence: Synthetic peptide
  N-term Ac
  MOD_RES (4)..(4): Alpha-Me R-azide 1,4 triazole (6 carbon) alanine olefin amino acid connected by an all-carbon crosslinker comprising one double bond
  misc_feature (4)..(11): Crosslink between residues
  MOD_RES (6)..(6): 4-carboxy-Phe
  MOD_RES (10)..(10): homo-Leu
  MOD_RES (11)..(11): Alpha-Me alkyne 1,4 triazole (5 carbon) alanine olefin amino acid connected by an all-carbon crosslinker comprising one double bond
  C-term NH2
LTFAAFWAQLASAA

SEQ ID NO: 1861 - protein, 14 aa, Artificial Sequence
  Description of Artificial Sequence: Synthetic peptide
  N-term Ac
  MOD_RES (4)..(4): Alpha-Me R-azide 1,4 triazole (6 carbon) alanine olefin amino acid connected by an all-carbon crosslinker comprising one double bond
  misc_feature (4)..(11): Crosslink between residues
  MOD_RES (6)..(6): 4-carboxy-Phe
  MOD_RES (10)..(10): homo-Leu
  MOD_RES (11)..(11): Alpha-Me alkyne 1,4 triazole (5 carbon) alanine olefin amino acid connected by an all-carbon crosslinker comprising one double bond
  C-term NH2
LTFAAFWAQLASAA

SEQ ID NO: 1862 - protein, 14 aa, Artificial Sequence
  Description of Artificial Sequence: Synthetic peptide
  N-term Ac
  MOD_RES (4)..(4): Alpha-Me R-azide 1,4 triazole (6 carbon) alanine olefin amino acid connected by an all-carbon crosslinker comprising one double bond
  misc_feature (4)..(11): Crosslink between residues
  MOD_RES (10)..(10): homo-Leu
  MOD_RES (11)..(11): Alpha-Me alkyne 1,4 triazole (5 carbon) alanine olefin amino acid connected by an all-carbon crosslinker comprising one double bond
  C-term NH2
LTFAAYWSQLASAA

SEQ ID NO: 1863 - protein, 14 aa, Artificial Sequence
  Description of Artificial Sequence: Synthetic peptide
  N-term Ac
  MOD_RES (4)..(4): Alpha-Me R-azide 1,4 triazole (6 carbon) alanine olefin amino acid connected by an all-carbon crosslinker comprising one double bond
  misc_feature (4)..(11): Crosslink between residues
  MOD_RES (10)..(10): homo-Leu
  MOD_RES (11)..(11): Alpha-Me alkyne 1,4 triazole (5 carbon) alanine olefin amino acid connected by an all-carbon crosslinker comprising one double bond
  C-term NH2
LTFAAYWSQLASAA

SEQ ID NO: 1864 - protein, 15 aa, Artificial Sequence
  Description of Artificial Sequence: Synthetic peptide
  N-term Ac
  MOD_RES (4)..(4): Alpha-Me R-azide 1,4 triazole (6 carbon) alanine olefin amino acid connected by an all-carbon crosslinker comprising one double bond
  misc_feature (4)..(11): Crosslink between residues
  MOD_RES (11)..(11): Alpha-Me alkyne 1,4 triazole (5 carbon) alanine olefin amino acid connected by an all-carbon crosslinker comprising one double bond
  MOD_RES (14)..(14): Norleucine
  C-term NH2
LTFAEYWAQLAAALA

SEQ ID NO: 1865 - protein, 15 aa, Artificial Sequence
  Description of Artificial Sequence: Synthetic peptide
  N-term Ac
  MOD_RES (3)..(3): 3,4-difluoro-Phe
  MOD_RES (4)..(4): Alpha-Me R-azide 1,4 triazole (6 carbon) alanine olefin amino acid connected by an all-carbon crosslinker comprising one double bond
  misc_feature (4)..(11): Crosslink between residues
  MOD_RES (11)..(11): Alpha-Me alkyne 1,4 triazole (5 carbon) alanine olefin amino acid connected by an all-carbon crosslinker comprising one double bond
  MOD_RES (14)..(14): Norleucine
  C-term NH2
LTFAAYWAQLAAALA

SEQ ID NO: 1866 - protein, 15 aa, Artificial Sequence
  Description of Artificial Sequence: Synthetic peptide
  N-term Ac
  MOD_RES (4)..(4): Alpha-Me R-azide 1,4 triazole (6 carbon) alanine olefin amino acid connected by an all-carbon crosslinker comprising one double bond
  misc_feature (4)..(11): Crosslink between residues
  MOD_RES (6)..(6): 4-carboxy-Phe
  MOD_RES (11)..(11): Alpha-Me alkyne 1,4 triazole (5 carbon) alanine olefin amino acid connected by an all-carbon crosslinker comprising one double bond
  MOD_RES (14)..(14): Norleucine
  C-term NH2
LTFAAFWAQLAAALA

SEQ ID NO: 1867 - protein, 15 aa, Artificial Sequence
  Description of Artificial Sequence: Synthetic peptide
  N-term Ac
  MOD_RES (4)..(4): Alpha-Me R-azide 1,4 triazole (6 carbon) alanine olefin amino acid connected by an all-carbon crosslinker comprising one double bond
  misc_feature (4)..(11): Crosslink between residues
  MOD_RES (11)..(11): Alpha-Me alkyne 1,4 triazole (5 carbon) alanine olefin amino acid connected by an all-carbon crosslinker comprising one double bond
  MOD_RES (14)..(14): Norleucine
  C-term NH2
LTFAAYWSQLAAALA

SEQ ID NO: 1868 - protein, 15 aa, Artificial Sequence
  Description of Artificial Sequence: Synthetic peptide
  N-term Ac
  MOD_RES (3)..(3): 3,4-difluoro-Phe
  MOD_RES (4)..(4): Alpha-Me R-azide 1,4 triazole (6 carbon) alanine olefin amino acid connected by an all-carbon crosslinker comprising one double bond
  misc_feature (4)..(11): Crosslink between residues
  MOD_RES (10)..(10): homo-Leu
  MOD_RES (11)..(11): Alpha-Me alkyne 1,4 triazole (5 carbon) alanine olefin amino acid connected by an all-carbon crosslinker comprising one double bond
  MOD_RES (14)..(14): Norleucine
  C-term NH2
LTFAAYWAQLAAALA

SEQ ID NO: 1869 - protein, 15 aa, Artificial Sequence
  Description of Artificial Sequence: Synthetic peptide
  N-term Ac
  MOD_RES (3)..(3): 3,4-difluoro-Phe
  MOD_RES (4)..(4): Alpha-Me R-azide 1,4 triazole (6 carbon) alanine olefin amino acid connected by an all-carbon crosslinker comprising one double bond
  misc_feature (4)..(11): Crosslink between residues
  MOD_RES (10)..(10): homo-Leu
  MOD_RES (11)..(11): Alpha-Me alkyne 1,4 triazole (5 carbon) alanine olefin amino acid connected by an all-carbon crosslinker comprising one double bond
  MOD_RES (14)..(14): Norleucine
  C-term NH2
LTFAAYWAQLAAALA

SEQ ID NO: 1870 - protein, 15 aa, Artificial Sequence
  Description of Artificial Sequence: Synthetic peptide
  N-term Ac
  MOD_RES (4)..(4): Alpha-Me R-azide 1,4 triazole (6 carbon) alanine olefin amino acid connected by an all-carbon crosslinker comprising one double bond
  misc_feature (4)..(11): Crosslink between residues
  MOD_RES (6)..(6): 4-carboxy-Phe
  MOD_RES (10)..(10): homo-Leu
  MOD_RES (11)..(11): Alpha-Me alkyne 1,4 triazole (5 carbon) alanine olefin amino acid connected by an all-carbon crosslinker comprising one double bond
  MOD_RES (14)..(14): Norleucine
  C-term NH2
LTFAAFWAQLAAALA

SEQ ID NO: 1871 - protein, 15 aa, Artificial Sequence
  Description of Artificial Sequence: Synthetic peptide
  N-term Ac
  MOD_RES (4)..(4): Alpha-Me R-azide 1,4 triazole (6 carbon) alanine olefin amino acid connected by an all-carbon crosslinker comprising one double bond
  misc_feature (4)..(11): Crosslink between residues
  MOD_RES (6)..(6): 4-carboxy-Phe
  MOD_RES (10)..(10): homo-Leu
  MOD_RES (11)..(11): Alpha-Me alkyne 1,4 triazole (5 carbon) alanine olefin amino acid connected by an all-carbon crosslinker comprising one double bond
  MOD_RES (14)..(14): Norleucine
  C-term NH2
LTFAAFWAQLAAALA

SEQ ID NO: 1872 - protein, 15 aa, Artificial Sequence
  Description of Artificial Sequence: Synthetic peptide
  N-term Ac
  MOD_RES (4)..(4): Alpha-Me R-azide 1,4 triazole (6 carbon) alanine olefin amino acid connected by an all-carbon crosslinker comprising one double bond
  misc_feature (4)..(11): Crosslink between residues
  MOD_RES (10)..(10): homo-Leu
  MOD_RES (11)..(11): Alpha-Me alkyne 1,4 triazole (5 carbon) alanine olefin amino acid connected by an all-carbon crosslinker comprising one double bond
  MOD_RES (14)..(14): Norleucine
  C-term NH2
LTFAAYWSQLAAALA

SEQ ID NO: 1873 - protein, 15 aa, Artificial Sequence
  Description of Artificial Sequence: Synthetic peptide
  N-term Ac
  MOD_RES (4)..(4): Alpha-Me R-azide 1,4 triazole (6 carbon) alanine olefin amino acid connected by an all-carbon crosslinker comprising one double bond
  misc_feature (4)..(11): Crosslink between residues
  MOD_RES (10)..(10): homo-Leu
  MOD_RES (11)..(11): Alpha-Me alkyne 1,4 triazole (5 carbon) alanine olefin amino acid connected by an all-carbon crosslinker comprising one double bond
  MOD_RES (14)..(14): Norleucine
  C-term NH2
LTFAAYWSQLAAALA

SEQ ID NO: 1874 - protein, 16 aa, Artificial Sequence
  Description of Artificial Sequence: Synthetic peptide
  N-term Ac
  MOD_RES (4)..(4): Alpha-Me R-azide 1,4 triazole (6 carbon) alanine olefin amino acid connected by an all-carbon crosslinker comprising one double bond
  misc_feature (4)..(11): Crosslink between residues
  MOD_RES (10)..(10): homo-Leu
  MOD_RES (11)..(11): Alpha-Me alkyne 1,4 triazole (5 carbon) alanine olefin amino acid connected by an all-carbon crosslinker comprising one double bond
  MOD_RES (16)..(16): D-amino acid
  C-term NH2
LTFAAYWAQLAAAAAA

SEQ ID NO: 1875 - protein, 16 aa, Artificial Sequence
  Description of Artificial Sequence: Synthetic peptide
  N-term Ac
  MOD_RES (4)..(4): Alpha-Me R-azide 1,4 triazole (6 carbon) alanine olefin amino acid connected by an all-carbon crosslinker comprising one double bond
  misc_feature (4)..(11): Crosslink between residues
  MOD_RES (10)..(10): homo-Leu
  MOD_RES (11)..(11): Alpha-Me alkyne 1,4 triazole (5 carbon) alanine olefin amino acid connected by an all-carbon crosslinker comprising one double bond
  MOD_RES (16)..(16): D-amino acid
  C-term NH2
LTFAAYWAQLAAAAAA

SEQ ID NO: 1876 - protein, 17 aa, Artificial Sequence
  Description of Artificial Sequence: Synthetic peptide
  N-term Ac
  MOD_RES (4)..(4): Alpha-Me R-azide 1,4 triazole (6 carbon) alanine olefin amino acid connected by an all-carbon crosslinker comprising one double bond
  misc_feature (4)..(11): Crosslink between residues
  MOD_RES (11)..(11): Alpha-Me alkyne 1,4 triazole (5 carbon) alanine olefin amino acid connected by an all-carbon crosslinker comprising one double bond
  MOD_RES (17)..(17): D-amino acid
  C-term NH2
LTFAAYWAQLAAAAAAA

SEQ ID NO: 1877 - protein, 18 aa, Artificial Sequence
  Description of Artificial Sequence: Synthetic peptide
  N-term Ac
  MOD_RES (4)..(4): Alpha-Me R-azide 1,4 triazole (6 carbon) alanine olefin amino acid connected by an all-carbon crosslinker comprising one double bond
  misc_feature (4)..(11): Crosslink between residues
  MOD_RES (11)..(11): Alpha-Me alkyne 1,4 triazole (5 carbon) alanine olefin amino acid connected by an all-carbon crosslinker comprising one double bond
  MOD_RES (18)..(18): D-amino acid
  C-term NH2
LTFAAYWAQLAAAAAAAA

SEQ ID NO: 1878 - protein, 18 aa, Artificial Sequence
  Description of Artificial Sequence: Synthetic peptide
  N-term Ac
  MOD_RES (4)..(4): Alpha-Me R-azide 1,4 triazole (6 carbon) alanine olefin amino acid connected by an all-carbon crosslinker comprising one double bond
  misc_feature (4)..(11): Crosslink between residues
  MOD_RES (11)..(11): Alpha-Me alkyne 1,4 triazole (5 carbon) alanine olefin amino acid connected by an all-carbon crosslinker comprising one double bond
  MOD_RES (18)..(18): D-amino acid
  C-term NH2
LTFAAYWAQLAAAAAAAA

SEQ ID NO: 1879 - protein, 15 aa, Artificial Sequence
  Description of Artificial Sequence: Synthetic peptide
  N-term Ac
  MOD_RES (4)..(4): Alpha-Me R-azide 1,4 triazole (6 carbon) alanine olefin amino acid connected by an all-carbon crosslinker comprising one double bond
  misc_feature (4)..(11): Crosslink between residues
  MOD_RES (10)..(10): homo-Leu
  MOD_RES (11)..(11): Alpha-Me alkyne 1,4 triazole (5 carbon) alanine olefin amino acid connected by an all-carbon crosslinker comprising one double bond
  MOD_RES (14)..(14): Norleucine
  C-term NH2
LTFAEYWAQLAAALA

SEQ ID NO: 1880 - protein, 16 aa, Artificial Sequence
  Description of Artificial Sequence: Synthetic peptide
  N-term Ac
  MOD_RES (5)..(5): Alpha-Me R-azide 1,4 triazole (6 carbon) alanine olefin amino acid connected by an all-carbon crosslinker comprising one double bond
  misc_feature (5)..(12): Crosslink between residues
  MOD_RES (12)..(12): Alpha-Me alkyne 1,4 triazole (5 carbon) alanine olefin amino acid connected by an all-carbon crosslinker comprising one double bond
  MOD_RES (15)..(15): Norleucine
  C-term NH2
AATFAAYWAQLAAALA

SEQ ID NO: 1881 - protein, 16 aa, Artificial Sequence
  Description of Artificial Sequence: Synthetic peptide
  N-term Ac
  MOD_RES (4)..(4): Alpha-Me R-azide 1,4 triazole (6 carbon) alanine olefin amino acid connected by an all-carbon crosslinker comprising one double bond
  misc_feature (4)..(11): Crosslink between residues
  MOD_RES (11)..(11): Alpha-Me alkyne 1,4 triazole (5 carbon) alanine olefin amino acid connected by an all-carbon crosslinker comprising one double bond
  MOD_RES (14)..(14): Norleucine
  C-term NH2
LTFAAYWAQLAAALAA

SEQ ID NO: 1882 - protein, 17 aa, Artificial Sequence
  Description of Artificial Sequence: Synthetic peptide
  N-term Ac
  MOD_RES (5)..(5): Alpha-Me R-azide 1,4 triazole (6 carbon) alanine olefin amino acid connected by an all-carbon crosslinker comprising one double bond
  misc_feature (5)..(12): Crosslink between residues
  MOD_RES (12)..(12): Alpha-Me alkyne 1,4 triazole (5 carbon) alanine olefin amino acid connected by an all-carbon crosslinker comprising one double bond
  MOD_RES (15)..(15): Norleucine
  C-term NH2
ALTFAAYWAQLAAALAA

SEQ ID NO: 1883 - protein, 16 aa, Artificial Sequence
  Description of Artificial Sequence: Synthetic peptide
  N-term Ac
  MOD_RES (4)..(4): Alpha-Me R-azide 1,4 triazole (6 carbon) alanine olefin amino acid connected by an all-carbon crosslinker comprising one double bond
  misc_feature (4)..(11): Crosslink between residues
  MOD_RES (10)..(10): Cyclobutyl-Ala
  MOD_RES (11)..(11): Alpha-Me alkyne 1,4 triazole (5 carbon) alanine olefin amino acid connected by an all-carbon crosslinker comprising one double bond
  MOD_RES (14)..(14): Norleucine
  C-term NH2
LTFAAYWAQAAAALAA

SEQ ID NO: 1884 - protein, 16 aa, Artificial Sequence
  Description of Artificial Sequence: Synthetic peptide
  N-term Ac
  MOD_RES (4)..(4): Alpha-Me R-azide 1,4 triazole (6 carbon) alanine olefin amino acid connected by an all-carbon crosslinker comprising one double bond
  misc_feature (4)..(11): Crosslink between residues
  MOD_RES (10)..(10): homo-Leu
  MOD_RES (11)..(11): Alpha-Me alkyne 1,4 triazole (5 carbon) alanine olefin amino acid connected by an all-carbon crosslinker comprising one double bond
  MOD_RES (14)..(14): Norleucine
  C-term NH2
LTFAAYWAQLAAALAA

SEQ ID NO: 1885 - protein, 15 aa, Artificial Sequence
  Description of Artificial Sequence: Synthetic peptide
  N-term Ac
  MOD_RES (4)..(4): Alpha-Me R-azide 1,4 triazole (6 carbon) alanine olefin amino acid connected by an all-carbon crosslinker comprising one double bond
  misc_feature (4)..(11): Crosslink between residues
  MOD_RES (10)..(10): Cyclobutyl-Ala
  MOD_RES (11)..(11): Alpha-Me alkyne 1,4 triazole (5 carbon) alanine olefin amino acid connected by an all-carbon crosslinker comprising one double bond
  C-term NH2
LTFAEYWAQAASAAA

SEQ ID NO: 1886 - protein, 15 aa, Artificial Sequence
  Description of Artificial Sequence: Synthetic peptide
  N-term Ac
  MOD_RES (4)..(4): Alpha-Me R-azide 1,4 triazole (6 carbon) alanine olefin amino acid connected by an all-carbon crosslinker comprising one double bond
  misc_feature (4)..(11): Crosslink between residues
  MOD_RES (10)..(10): Cyclobutyl-Ala
  MOD_RES (11)..(11): Alpha-Me alkyne 1,4 triazole (5 carbon) alanine olefin amino acid connected by an all-carbon crosslinker comprising one double bond
  C-term NH2
LTFAEYWAQAASAAA

SEQ ID NO: 1887 - protein, 16 aa, Artificial Sequence
  Description of Artificial Sequence: Synthetic peptide
  N-term Ac
  MOD_RES (4)..(4): Alpha-Me R-azide 1,4 triazole (6 carbon) alanine olefin amino acid connected by an all-carbon crosslinker comprising one double bond
  misc_feature (4)..(11): Crosslink between residues
  MOD_RES (10)..(10): Cyclobutyl-Ala
  MOD_RES (11)..(11): Alpha-Me alkyne 1,4 triazole (5 carbon) alanine olefin amino acid connected by an all-carbon crosslinker comprising one double bond
  C-term NH2
LTFAEYWAQAASAAAA

SEQ ID NO: 1888 - protein, 16 aa, Artificial Sequence
  Description of Artificial Sequence: Synthetic peptide
  N-term Ac
  MOD_RES (4)..(4): Alpha-Me R-azide 1,4 triazole (6 carbon) alanine olefin amino acid connected by an all-carbon crosslinker comprising one double bond
  misc_feature (4)..(11): Crosslink between residues
  MOD_RES (10)..(10): Cyclobutyl-Ala
  MOD_RES (11)..(11): Alpha-Me alkyne 1,4 triazole (5 carbon) alanine olefin amino acid connected by an all-carbon crosslinker comprising one double bond
  C-term NH2
LTFAEYWAQAASAAAA

SEQ ID NO: 1889 - protein, 15 aa, Artificial Sequence
  Description of Artificial Sequence: Synthetic peptide
  N-term Ac
  MOD_RES (5)..(5): Alpha-Me R-azide 1,4 triazole (6 carbon) alanine olefin amino acid connected by an all-carbon crosslinker comprising one double bond
  misc_feature (5)..(12): Crosslink between residues
  MOD_RES (11)..(11): Cyclobutyl-Ala
  MOD_RES (12)..(12): Alpha-Me alkyne 1,4 triazole (5 carbon) alanine olefin amino acid connected by an all-carbon crosslinker comprising one double bond
  C-term NH2
ALTFAEYWAQAASAA

SEQ ID NO: 1890 - protein, 16 aa, Artificial Sequence
  Description of Artificial Sequence: Synthetic peptide
  N-term Ac
  MOD_RES (5)..(5): Alpha-Me R-azide 1,4 triazole (6 carbon) alanine olefin amino acid connected by an all-carbon crosslinker comprising one double bond
  misc_feature (5)..(12): Crosslink between residues
  MOD_RES (11)..(11): Cyclobutyl-Ala
  MOD_RES (12)..(12): Alpha-Me alkyne 1,4 triazole (5 carbon) alanine olefin amino acid connected by an all-carbon crosslinker comprising one double bond
  C-term NH2
ALTFAEYWAQAASAAA

SEQ ID NO: 1891 - protein, 15 aa, Artificial Sequence
  Description of Artificial Sequence: Synthetic peptide
  N-term Ac
  MOD_RES (5)..(5): Alpha-Me R-azide 1,4 triazole (6 carbon) alanine olefin amino acid connected by an all-carbon crosslinker comprising one double bond
  misc_feature (5)..(12): Crosslink between residues
  MOD_RES (11)..(11): Cyclobutyl-Ala
  MOD_RES (12)..(12): Alpha-Me alkyne 1,4 triazole (5 carbon) alanine olefin amino acid connected by an all-carbon crosslinker comprising one double bond
  C-term NH2
ALTFAEYWAQAASAA

SEQ ID NO: 1892 - protein, 17 aa, Artificial Sequence
  Description of Artificial Sequence: Synthetic peptide
  N-term Ac
  MOD_RES (4)..(4): Alpha-Me R-azide 1,4 triazole (6 carbon) alanine olefin amino acid connected by an all-carbon crosslinker comprising one double bond
  misc_feature (4)..(11): Crosslink between residues
  MOD_RES (11)..(11): Alpha-Me alkyne 1,4 triazole (5 carbon) alanine olefin amino acid connected by an all-carbon crosslinker comprising one double bond
  MOD_RES (17)..(17): D-amino acid
  C-term NH2
LTFAEYWAQLAAAAAAA

SEQ ID NO: 1893 - protein, 14 aa, Artificial Sequence
  Description of Artificial Sequence: Synthetic peptide
  N-term Ac
  MOD_RES (4)..(4): Alpha-Me R-azide 1,4 triazole (6 carbon) alanine olefin amino acid connected by an all-carbon crosslinker comprising one double bond
  misc_feature (4)..(11): Crosslink between residues
  MOD_RES (7)..(7): 6cl-Trp
  MOD_RES (10)..(10): Cyclobutyl-Ala
  MOD_RES (11)..(11): Alpha-Me alkyne 1,4 triazole (5 carbon) alanine olefin amino acid connected by an all-carbon crosslinker comprising one double bond
  C-term NH2
LTFAEYWAQAASAA

SEQ ID NO: 1894 - protein, 15 aa, Artificial Sequence
  Description of Artificial Sequence: Synthetic peptide
  N-term Ac
  MOD_RES (4)..(4): Alpha-Me R-azide 1,4 triazole (6 carbon) alanine olefin amino acid connected by an all-carbon crosslinker comprising one double bond
  misc_feature (4)..(11): Crosslink between residues
  MOD_RES (6)..(6): 4-carboxy-Phe
  MOD_RES (7)..(7): 6cl-Trp
  MOD_RES (10)..(10): Cyclobutyl-Ala
  MOD_RES (11)..(11): Alpha-Me alkyne 1,4 triazole (5 carbon) alanine olefin amino acid connected by an all-carbon crosslinker comprising one double bond
  MOD_RES (14)..(14): Norleucine
  C-term NH2
LTFAEFWAQAASALA

SEQ ID NO: 1895 - protein, 15 aa, Artificial Sequence
  Description of Artificial Sequence: Synthetic peptide
  N-term Ac
  MOD_RES (4)..(4): Alpha-Me R-azide 1,4 triazole (6 carbon) alanine olefin amino acid connected by an all-carbon crosslinker comprising one double bond
  misc_feature (4)..(11): Crosslink between residues
  MOD_RES (6)..(6): 4-carboxy-Phe
  MOD_RES (7)..(7): 6cl-Trp
  MOD_RES (10)..(10): Cyclobutyl-Ala
  MOD_RES (11)..(11): Alpha-Me alkyne 1,4 triazole (5 carbon) alanine olefin amino acid connected by an all-carbon crosslinker comprising one double bond
  MOD_RES (14)..(14): Norleucine
  C-term NH2
LTFAEFWAQAASALA

SEQ ID NO: 1896 - protein, 15 aa, Artificial Sequence
  Description of Artificial Sequence: Synthetic peptide
  N-term Ac
  MOD_RES (4)..(4): Alpha-Me R-azide 1,4 triazole (6 carbon) alanine olefin amino acid connected by an all-carbon crosslinker comprising one double bond
  misc_feature (4)..(11): Crosslink between residues
  MOD_RES (6)..(6): 4-carboxy-Phe
  MOD_RES (7)..(7): 6cl-Trp
  MOD_RES (10)..(10): Cyclobutyl-Ala
  MOD_RES (11)..(11): Alpha-Me alkyne 1,4 triazole (5 carbon) alanine olefin amino acid connected by an all-carbon crosslinker comprising one double bond
  MOD_RES (15)..(15): D-amino acid
  C-term NH2
LTFAEFWAQAAAAIA

SEQ ID NO: 1897 - protein, 15 aa, Artificial Sequence
  Description of Artificial Sequence: Synthetic peptide
  N-term Ac
  MOD_RES (4)..(4): Alpha-Me R-azide 1,4 triazole (6 carbon) alanine olefin amino acid connected by an all-carbon crosslinker comprising one double bond
  misc_feature (4)..(11): Crosslink between residues
  MOD_RES (6)..(6): 4-carboxy-Phe
  MOD_RES (7)..(7): 6cl-Trp
  MOD_RES (10)..(10): Cyclobutyl-Ala
  MOD_RES (11)..(11): Alpha-Me alkyne 1,4 triazole (5 carbon) alanine olefin amino acid connected by an all-carbon crosslinker comprising one double bond
  MOD_RES (15)..(15): D-amino acid
  C-term NH2
LTFAEFWAQAAAAIA

SEQ ID NO: 1898 - protein, 17 aa, Artificial Sequence
  Description of Artificial Sequence: Synthetic peptide
  N-term Ac
  MOD_RES (4)..(4): Alpha-Me R-azide 1,4 triazole (6 carbon) alanine olefin amino acid connected by an all-carbon crosslinker comprising one double bond
  misc_feature (4)..(11): Crosslink between residues
  MOD_RES (7)..(7): 6cl-Trp
  MOD_RES (11)..(11): Alpha-Me alkyne 1,4 triazole (5 carbon) alanine olefin amino acid connected by an all-carbon crosslinker comprising one double bond
  MOD_RES (17)..(17): D-amino acid
  C-term NH2
LTFAAYWAQLAAAAAAA

SEQ ID NO: 1899 - protein, 17 aa, Artificial Sequence
  Description of Artificial Sequence: Synthetic peptide
  N-term Ac
  MOD_RES (4)..(4): Alpha-Me R-azide 1,4 triazole (6 carbon) alanine olefin amino acid connected by an all-carbon crosslinker comprising one double bond
  misc_feature (4)..(11): Crosslink between residues
  MOD_RES (7)..(7): 6cl-Trp
  MOD_RES (11)..(11): Alpha-Me alkyne 1,4 triazole (5 carbon) alanine olefin amino acid connected by an all-carbon crosslinker comprising one double bond
  MOD_RES (17)..(17): D-amino acid
  C-term NH2
LTFAAYWAQLAAAAAAA

SEQ ID NO: 1900 - protein, 16 aa, Artificial Sequence
  Description of Artificial Sequence: Synthetic peptide
  N-term Ac
  MOD_RES (2)..(2): Alpha-Me R-azide 1,4 triazole (6 carbon) alanine olefin amino acid connected by an all-carbon crosslinker comprising one double bond
  misc_feature (2)..(9): Crosslink between residues
  MOD_RES (5)..(5): 6cl-Trp
  MOD_RES (9)..(9): Alpha-Me alkyne 1,4 triazole (5 carbon) alanine olefin amino acid connected by an all-carbon crosslinker comprising one double bond
  MOD_RES (16)..(16): D-amino acid
  C-term NH2
FAAYWEALAAAAAAAA

SEQ ID NO: 1901 - protein, 17 aa, Artificial Sequence
  Description of Artificial Sequence: Synthetic peptide
  N-term Ac
  MOD_RES (4)..(4): Alpha-Me R-azide 1,4 triazole (6 carbon) alanine olefin amino acid connected by an all-carbon crosslinker comprising one double bond
  misc_feature (4)..(11): Crosslink between residues
  MOD_RES (11)..(11): Alpha-Me alkyne 1,4 triazole (5 carbon) alanine olefin amino acid connected by an all-carbon crosslinker comprising one double bond
  MOD_RES (17)..(17): D-amino acid
  C-term NH2
ETFAEYWAQLAAAAAAA

SEQ ID NO: 1902 - protein, 17 aa, Artificial Sequence
  Description of Artificial Sequence: Synthetic peptide
  N-term Ac
  MOD_RES (4)..(4): Alpha-Me R-azide 1,4 triazole (6 carbon) alanine olefin amino acid connected by an all-carbon crosslinker comprising one double bond
  misc_feature (4)..(11): Crosslink between residues
  MOD_RES (11)..(11): Alpha-Me alkyne 1,4 triazole (5 carbon) alanine olefin amino acid connected by an all-carbon crosslinker comprising one double bond
  MOD_RES (17)..(17): D-amino acid
  C-term NH2
ETFAEYWAQLAAAAAAA

SEQ ID NO: 1903 - protein, 18 aa, Artificial Sequence
  Description of Artificial Sequence: Synthetic peptide
  N-term Ac
  MOD_RES (4)..(4): Alpha-Me R-azide 1,4 triazole (6 carbon) alanine olefin amino acid connected by an all-carbon crosslinker comprising one double bond
  misc_feature (4)..(11): Crosslink between residues
  MOD_RES (11)..(11): Alpha-Me alkyne 1,4 triazole (5 carbon) alanine olefin amino acid connected by an all-carbon crosslinker comprising one double bond
  MOD_RES (18)..(18): D-amino acid
  C-term NH2
LTFAEYWAQLAAAAAAAA

SEQ ID NO: 1904 - protein, 18 aa, Artificial Sequence
  Description of Artificial Sequence: Synthetic peptide
  N-term Ac
  MOD_RES (4)..(4): Alpha-Me R-azide 1,4 triazole (6 carbon) alanine olefin amino acid connected by an all-carbon crosslinker comprising one double bond
  misc_feature (4)..(11): Crosslink between residues
  MOD_RES (11)..(11): Alpha-Me alkyne 1,4 triazole (5 carbon) alanine olefin amino acid connected by an all-carbon crosslinker comprising one double bond
  MOD_RES (18)..(18): D-amino acid
  C-term NH2
LTFAEYWAQLAAAAAAAA

SEQ ID NO: 1905 - protein, 17 aa, Artificial Sequence
  Description of Artificial Sequence: Synthetic peptide
  N-term Ac
  MOD_RES (4)..(4): Alpha-Me R-azide 1,4 triazole (6 carbon) alanine olefin amino acid connected by an all-carbon crosslinker comprising one double bond
  misc_feature (4)..(11): Crosslink between residues
  MOD_RES (11)..(11): Alpha-Me alkyne 1,4 triazole (5 carbon) alanine olefin amino acid connected by an all-carbon crosslinker comprising one double bond
  MOD_RES (14)..(14): Norleucine
  MOD_RES (17)..(17): D-amino acid
  C-term NH2
LTFAAYWAQLAAALAAA

SEQ ID NO: 1906 - protein, 17 aa, Artificial Sequence
  Description of Artificial Sequence: Synthetic peptide
  N-term Ac
  MOD_RES (4)..(4): Alpha-Me R-azide 1,4 triazole (6 carbon) alanine olefin amino acid connected by an all-carbon crosslinker comprising one double bond
  misc_feature (4)..(11): Crosslink between residues
  MOD_RES (11)..(11): Alpha-Me alkyne 1,4 triazole (5 carbon) alanine olefin amino acid connected by an all-carbon crosslinker comprising one double bond
  MOD_RES (14)..(14): Norleucine
  MOD_RES (17)..(17): D-amino acid
  C-term NH2
LTFAAYWAQLAAALAAA

SEQ ID NO: 1907 - protein, 17 aa, Artificial Sequence
  Description of Artificial Sequence: Synthetic peptide
  N-term Ac
  MOD_RES (4)..(4): Alpha-Me R-azide 1,4 triazole (6 carbon) alanine olefin amino acid connected by an all-carbon crosslinker comprising one double bond
  misc_feature (4)..(11): Crosslink between residues
  MOD_RES (10)..(10): Cyclobutyl-Ala
  MOD_RES (11)..(11): Alpha-Me alkyne 1,4 triazole (5 carbon) alanine olefin amino acid connected by an all-carbon crosslinker comprising one double bond
  MOD_RES (17)..(17): D-amino acid
  C-term NH2
LTFAEYWAQAAAAAAAA

SEQ ID NO: 1908 - protein, 17 aa, Artificial Sequence
  Description of Artificial Sequence: Synthetic peptide
  N-term Ac
  MOD_RES (4)..(4): Alpha-Me R-azide 1,4 triazole (6 carbon) alanine olefin amino acid connected by an all-carbon crosslinker comprising one double bond
  misc_feature (4)..(11): Crosslink between residues
  MOD_RES (10)..(10): Cyclobutyl-Ala
  MOD_RES (11)..(11): Alpha-Me alkyne 1,4 triazole (5 carbon) alanine olefin amino acid connected by an all-carbon crosslinker comprising one double bond
  MOD_RES (17)..(17): D-amino acid
  C-term NH2
LTFAEYWAQAAAAAAAA

SEQ ID NO: 1909 - protein, 17 aa, Artificial Sequence
  Description of Artificial Sequence: Synthetic peptide
  N-term Ac
  MOD_RES (4)..(4): Alpha-Me R-azide 1,4 triazole (6 carbon) alanine olefin amino acid connected by an all-carbon crosslinker comprising one double bond
  misc_feature (4)..(11): Crosslink between residues
  MOD_RES (6)..(6): 4-carboxy-Phe
  MOD_RES (10)..(10): Cyclobutyl-Ala
  MOD_RES (11)..(11): Alpha-Me alkyne 1,4 triazole (5 carbon) alanine olefin amino acid connected by an all-carbon crosslinker comprising one double bond
  MOD_RES (17)..(17): D-amino acid
  C-term NH2
LTFAEFWAQAAAAAAAA

SEQ ID NO: 1910 - protein, 17 aa, Artificial Sequence
  Description of Artificial Sequence: Synthetic peptide
  N-term Ac
  MOD_RES (4)..(4): Alpha-Me R-azide 1,4 triazole (6 carbon) alanine olefin amino acid connected by an all-carbon crosslinker comprising one double bond
  misc_feature (4)..(11): Crosslink between residues
  MOD_RES (6)..(6): 4-carboxy-Phe
  MOD_RES (10)..(10): Cyclobutyl-Ala
  MOD_RES (11)..(11): Alpha-Me alkyne 1,4 triazole (5 carbon) alanine olefin amino acid connected by an all-carbon crosslinker comprising one double bond
  MOD_RES (17)..(17): D-amino acid
  C-term NH2
LTFAEFWAQAAAAAAAA

SEQ ID NO: 1911 - protein, 17 aa, Artificial Sequence
  Description of Artificial Sequence: Synthetic peptide
  N-term Ac
  MOD_RES (4)..(4): Alpha-Me R-azide 1,4 triazole (6 carbon) alanine olefin amino acid connected by an all-carbon crosslinker comprising one double bond
  misc_feature (4)..(11): Crosslink between residues
  MOD_RES (10)..(10): Cyclobutyl-Ala
  MOD_RES (11)..(11): Alpha-Me alkyne 1,4 triazole (5 carbon) alanine olefin amino acid connected by an all-carbon crosslinker comprising one double bond
  MOD_RES (17)..(17): D-amino acid
  C-term NH2
LTFAEYWSQAAAAAAAA

SEQ ID NO: 1912 - protein, 17 aa, Artificial Sequence
  Description of Artificial Sequence: Synthetic peptide
  N-term Ac
  MOD_RES (4)..(4): Alpha-Me R-azide 1,4 triazole (6 carbon) alanine olefin amino acid connected by an all-carbon crosslinker comprising one double bond
  misc_feature (4)..(11): Crosslink between residues
  MOD_RES (10)..(10): Cyclobutyl-Ala
  MOD_RES (11)..(11): Alpha-Me alkyne 1,4 triazole (5 carbon) alanine olefin amino acid connected by an all-carbon crosslinker comprising one double bond
  MOD_RES (17)..(17): D-amino acid
  C-term NH2
LTFAEYWSQAAAAAAAA

SEQ ID NO: 1913 - protein, 15 aa, Artificial Sequence
  Description of Artificial Sequence: Synthetic peptide
  N-term Ac
  MOD_RES (4)..(4): Alpha-Me R-azide 1,4 triazole (6 carbon) alanine olefin amino acid connected by an all-carbon crosslinker comprising one double bond
  misc_feature (4)..(11): Crosslink between residues
  MOD_RES (10)..(10): Cyclobutyl-Ala
  MOD_RES (11)..(11): Alpha-Me alkyne 1,4 triazole (5 carbon) alanine olefin amino acid connected by an all-carbon crosslinker comprising one double bond
  MOD_RES (15)..(15): D-amino acid
  C-term NH2
LTFAEYWAQAASAAA

SEQ ID NO: 1914 - protein, 15 aa, Artificial Sequence
  Description of Artificial Sequence: Synthetic peptide
  N-term Ac
  MOD_RES (4)..(4): Alpha-Me R-azide 1,4 triazole (6 carbon) alanine olefin amino acid connected by an all-carbon crosslinker comprising one double bond
  misc_feature (4)..(11): Crosslink between residues
  MOD_RES (10)..(10): Cyclobutyl-Ala
  MOD_RES (11)..(11): Alpha-Me alkyne 1,4 triazole (5 carbon) alanine olefin amino acid connected by an all-carbon crosslinker comprising one double bond
  MOD_RES (15)..(15): D-amino acid
  C-term NH2
LTFAEYWAQAASAAA

SEQ ID NO: 1915 - protein, 16 aa, Artificial Sequence
  Description of Artificial Sequence: Synthetic peptide
  N-term Ac
  MOD_RES (5)..(5): Alpha-Me R-azide 1,4 triazole (6 carbon) alanine olefin amino acid connected by an all-carbon crosslinker comprising one double bond
  misc_feature (5)..(12): Crosslink between residues
  MOD_RES (11)..(11): Cyclobutyl-Ala
  MOD_RES (12)..(12): Alpha-Me alkyne 1,4 triazole (5 carbon) alanine olefin amino acid connected by an all-carbon crosslinker comprising one double bond
  MOD_RES (16)..(16): D-amino acid
  C-term NH2
ALTFAEYWAQAASAAA

SEQ ID NO: 1916 - protein, 16 aa, Artificial Sequence
  Description of Artificial Sequence: Synthetic peptide
  N-term Ac
  MOD_RES (5)..(5): Alpha-Me R-azide 1,4 triazole (6 carbon) alanine olefin amino acid connected by an all-carbon crosslinker comprising one double bond
  misc_feature (5)..(12): Crosslink between residues
  MOD_RES (11)..(11): Cyclobutyl-Ala
  MOD_RES (12)..(12): Alpha-Me alkyne 1,4 triazole (5 carbon) alanine olefin amino acid connected by an all-carbon crosslinker comprising one double bond
  MOD_RES (16)..(16): D-amino acid
  C-term NH2
ALTFAEYWAQAASAAA

SEQ ID NO: 1917 - protein, 17 aa, Artificial Sequence
  Description of Artificial Sequence: Synthetic peptide
  N-term Ac
  MOD_RES (5)..(5): Alpha-Me R-azide 1,4 triazole (6 carbon) alanine olefin amino acid connected by an all-carbon crosslinker comprising one double bond
  misc_feature (5)..(12): Crosslink between residues
  MOD_RES (11)..(11): Cyclobutyl-Ala
  MOD_RES (12)..(12): Alpha-Me alkyne 1,4 triazole (5 carbon) alanine olefin amino acid connected by an all-carbon crosslinker comprising one double bond
  MOD_RES (17)..(17): D-amino acid
  C-term NH2
ALTFAEYWAQAASAAAA

SEQ ID NO: 1918 - protein, 17 aa, Artificial Sequence
  Description of Artificial Sequence: Synthetic peptide
  N-term Ac
  MOD_RES (5)..(5): Alpha-Me R-azide 1,4 triazole (6 carbon) alanine olefin amino acid connected by an all-carbon crosslinker comprising one double bond
  misc_feature (5)..(12): Crosslink between residues
  MOD_RES (11)..(11): Cyclobutyl-Ala
  MOD_RES (12)..(12): Alpha-Me alkyne 1,4 triazole (5 carbon) alanine olefin amino acid connected by an all-carbon crosslinker comprising one double bond
  MOD_RES (17)..(17): D-amino acid
  C-term NH2
ALTFAEYWAQAASAAAA

SEQ ID NO: 1919 - protein, 18 aa, Artificial Sequence
  Description of Artificial Sequence: Synthetic peptide
  N-term Ac
  MOD_RES (6)..(6): Alpha-Me R-azide 1,4 triazole (6 carbon) alanine olefin amino acid connected by an all-carbon crosslinker comprising one double bond
  misc_feature (6)..(13): Crosslink between residues
  MOD_RES (12)..(12): Cyclobutyl-Ala
  MOD_RES (13)..(13): Alpha-Me alkyne 1,4 triazole (5 carbon) alanine olefin amino acid connected by an all-carbon crosslinker comprising one double bond
  MOD_RES (18)..(18): D-amino acid
  C-term NH2
AALTFAEYWAQAASAAAA

SEQ ID NO: 1920 - protein, 18 aa, Artificial Sequence
  Description of Artificial Sequence: Synthetic peptide
  N-term Ac
  MOD_RES (6)..(6): Alpha-Me R-azide 1,4 triazole (6 carbon) alanine olefin amino acid connected by an all-carbon crosslinker comprising one double bond
  misc_feature (6)..(13): Crosslink between residues
  MOD_RES (12)..(12): Cyclobutyl-Ala
  MOD_RES (13)..(13): Alpha-Me alkyne 1,4 triazole (5 carbon) alanine olefin amino acid connected by an all-carbon crosslinker comprising one double bond
  MOD_RES (18)..(18): D-amino acid
  C-term NH2
AALTFAEYWAQAASAAAA

SEQ ID NO: 1921 - protein, 14 aa, Artificial Sequence
  Description of Artificial Sequence: Synthetic peptide
  N-term Ac
  MOD_RES (4)..(4): Alpha-Me R-azide 1,4 triazole (6 carbon) alanine olefin amino acid connected by an all-carbon crosslinker comprising one double bond
  misc_feature (4)..(11): Crosslink between residues
  MOD_RES (10)..(10): Cyclobutyl-Ala
  MOD_RES (11)..(11): Alpha-Me alkyne 1,4 triazole (5 carbon) alanine olefin amino acid connected by an all-carbon crosslinker comprising one double bond
  C-term NH2
RTFAEYWAQAASAA

SEQ ID NO: 1922 - protein, 14 aa, Artificial Sequence
  Description of Artificial Sequence: Synthetic peptide
  N-term Ac
  MOD_RES (4)..(4): Alpha-Me R-azide 1,4 triazole (6 carbon) alanine olefin amino acid connected by an all-carbon crosslinker comprising one double bond
  misc_feature (4)..(11): Crosslink between residues
  MOD_RES (10)..(10): Cyclobutyl-Ala
  MOD_RES (11)..(11): Alpha-Me alkyne 1,4 triazole (5 carbon) alanine olefin amino acid connected by an all-carbon crosslinker comprising one double bond
  C-term NH2
LRFAEYWAQAASAA

SEQ ID NO: 1923 - protein, 14 aa, Artificial Sequence
  Description of Artificial Sequence: Synthetic peptide
  N-term Ac
  MOD_RES (4)..(4): Alpha-Me R-azide 1,4 triazole (6 carbon) alanine olefin amino acid connected by an all-carbon crosslinker comprising one double bond
  misc_feature (4)..(11): Crosslink between residues
  MOD_RES (10)..(10): Cyclobutyl-Ala
  MOD_RES (11)..(11): Alpha-Me alkyne 1,4 triazole (5 carbon) alanine olefin amino acid connected by an all-carbon crosslinker comprising one double bond
  C-term NH2
LTFAEYWRQAASAA

SEQ ID NO: 1924 - protein, 14 aa, Artificial Sequence
  Description of Artificial Sequence: Synthetic peptide
  N-term Ac
  MOD_RES (4)..(4): Alpha-Me R-azide 1,4 triazole (6 carbon) alanine olefin amino acid connected by an all-carbon crosslinker comprising one double bond
  misc_feature (4)..(11): Crosslink between residues
  MOD_RES (10)..(10): Cyclobutyl-Ala
  MOD_RES (11)..(11): Alpha-Me alkyne 1,4 triazole (5 carbon) alanine olefin amino acid connected by an all-carbon crosslinker comprising one double bond
  C-term NH2
LTFAEYWARAASAA

SEQ ID NO: 1925 - protein, 14 aa, Artificial Sequence
  Description of Artificial Sequence: Synthetic peptide
  N-term Ac
  MOD_RES (4)..(4): Alpha-Me R-azide 1,4 triazole (6 carbon) alanine olefin amino acid connected by an all-carbon crosslinker comprising one double bond
  misc_feature (4)..(11): Crosslink between residues
  MOD_RES (10)..(10): Cyclobutyl-Ala
  MOD_RES (11)..(11): Alpha-Me alkyne 1,4 triazole (5 carbon) alanine olefin amino acid connected by an all-carbon crosslinker comprising one double bond
  C-term NH2
LTFAEYWAQAARAA

SEQ ID NO: 1926 - protein, 14 aa, Artificial Sequence
  Description of Artificial Sequence: Synthetic peptide
  N-term Ac
  MOD_RES (4)..(4): Alpha-Me R-azide 1,4 triazole (6 carbon) alanine olefin amino acid connected by an all-carbon crosslinker comprising one double bond
  misc_feature (4)..(11): Crosslink between residues
  MOD_RES (10)..(10): Cyclobutyl-Ala
  MOD_RES (11)..(11): Alpha-Me alkyne 1,4 triazole (5 carbon) alanine olefin amino acid connected by an all-carbon crosslinker comprising one double bond
  C-term NH2
LTFAEYWAQAASRA

SEQ ID NO: 1927 - protein, 14 aa, Artificial Sequence
  Description of Artificial Sequence: Synthetic peptide
  N-term Ac
  MOD_RES (4)..(4): Alpha-Me R-azide 1,4 triazole (6 carbon) alanine olefin amino acid connected by an all-carbon crosslinker comprising one double bond
  misc_feature (4)..(11): Crosslink between residues
  MOD_RES (10)..(10): Cyclobutyl-Ala
  MOD_RES (11)..(11): Alpha-Me alkyne 1,4 triazole (5 carbon) alanine olefin amino acid connected by an all-carbon crosslinker comprising one double bond
  C-term NH2
LTFAEYWAQAASAR

SEQ ID NO: 1928 - protein, 15 aa, Artificial Sequence
  Description of Artificial Sequence: Synthetic peptide
  N-term 5-FAM
  MOD_RES (1)..(1): Beta-Ala
  MOD_RES (5)..(5): Alpha-Me R-azide 1,4 triazole (6 carbon) alanine olefin amino acid connected by an all-carbon crosslinker comprising one double bond
  misc_feature (5)..(12): Crosslink between residues
  MOD_RES (11)..(11): Cyclobutyl-Ala
  MOD_RES (12)..(12): Alpha-Me alkyne 1,4 triazole (5 carbon) alanine olefin amino acid connected by an all-carbon crosslinker comprising one double bond
  C-term NH2
ALTFAEYWAQAASAA

SEQ ID NO: 1929 - protein, 16 aa, Artificial Sequence
  Description of Artificial Sequence: Synthetic peptide
  N-term 5-FAM
  MOD_RES (1)..(1): Beta-Ala
  MOD_RES (5)..(5): Alpha-Me R-azide 1,4 triazole (6 carbon) alanine olefin amino acid connected by an all-carbon crosslinker comprising one double bond
  misc_feature (5)..(12): Crosslink between residues
  MOD_RES (12)..(12): Alpha-Me alkyne 1,4 triazole (5 carbon) alanine olefin amino acid connected by an all-carbon crosslinker comprising one double bond
  MOD_RES (15)..(15): Norleucine
  C-term NH2
ALTFAAYWAQLAAALA

SEQ ID NO: 1930 - protein, 15 aa, Artificial Sequence
  Description of Artificial Sequence: Synthetic peptide
  N-term Ac
  MOD_RES (4)..(4): Alpha-Me R-azide 1,4 triazole (6 carbon) alanine olefin amino acid connected by an all-carbon crosslinker comprising one double bond
  misc_feature (4)..(11): Crosslink between residues
  MOD_RES (11)..(11): Alpha-Me alkyne 1,4 triazole (5 carbon) alanine olefin amino acid connected by an all-carbon crosslinker comprising one double bond
  MOD_RES (14)..(14): Norleucine
  C-term NH2
LAFAEYWAQLAAALA

SEQ ID NO: 1931 - protein, 15 aa, Artificial Sequence
  Description of Artificial Sequence: Synthetic peptide
  N-term Ac
  MOD_RES (4)..(4): Alpha-Me R-azide 1,4 triazole (6 carbon) alanine olefin amino acid connected by an all-carbon crosslinker comprising one double bond
  misc_feature (4)..(11): Crosslink between residues
  MOD_RES (11)..(11): Alpha-Me alkyne 1,4 triazole (5 carbon) alanine olefin amino acid connected by an all-carbon crosslinker comprising one double bond
  MOD_RES (14)..(14): Norleucine
  C-term NH2
ATFAEYWAQLAAALA

SEQ ID NO: 1932 - protein, 15 aa, Artificial Sequence
  Description of Artificial Sequence: Synthetic peptide
  N-term Ac
  MOD_RES (4)..(4): Alpha-Me R-azide 1,4 triazole (6 carbon) alanine olefin amino acid connected by an all-carbon crosslinker comprising one double bond
  misc_feature (4)..(11): Crosslink between residues
  MOD_RES (11)..(11): Alpha-Me alkyne 1,4 triazole (5 carbon) alanine olefin amino acid connected by an all-carbon crosslinker comprising one double bond
  MOD_RES (14)..(14): Norleucine
  C-term NH2
AAFAEYWAQLAAALA

SEQ ID NO: 1933 - protein, 16 aa, Artificial Sequence
  Description of Artificial Sequence: Synthetic peptide
  N-term Ac
  MOD_RES (5)..(5): Alpha-Me R-azide 1,4 triazole (6 carbon) alanine olefin amino acid connected by an all-carbon crosslinker comprising one double bond
  misc_feature (5)..(12): Crosslink between residues
  MOD_RES (12)..(12): Alpha-Me alkyne 1,4 triazole (5 carbon) alanine olefin amino acid connected by an all-carbon crosslinker comprising one double bond
  MOD_RES (15)..(15): Norleucine
  C-term NH2
AAAFAEYWAQLAAALA

SEQ ID NO: 1934 - protein, 17 aa, Artificial Sequence
  Description of Artificial Sequence: Synthetic peptide
  N-term Ac
  MOD_RES (6)..(6): Alpha-Me R-azide 1,4 triazole (6 carbon) alanine olefin amino acid connected by an all-carbon crosslinker comprising one double bond
  misc_feature (6)..(13): Crosslink between residues
  MOD_RES (13)..(13): Alpha-Me alkyne 1,4 triazole (5 carbon) alanine olefin amino acid connected by an all-carbon crosslinker comprising one double bond
  MOD_RES (16)..(16): Norleucine
  C-term NH2
AAAAFAEYWAQLAAALA

SEQ ID NO: 1935 - protein, 16 aa, Artificial Sequence
  Description of Artificial Sequence: Synthetic peptide
  N-term Ac
  MOD_RES (5)..(5): Alpha-Me R-azide 1,4 triazole (6 carbon) alanine olefin amino acid connected by an all-carbon crosslinker comprising one double bond
  misc_feature (5)..(12): Crosslink between residues
  MOD_RES (12)..(12): Alpha-Me alkyne 1,4 triazole (5 carbon) alanine olefin amino acid connected by an all-carbon crosslinker comprising one double bond
  MOD_RES (15)..(15): Norleucine
  C-term NH2
AATFAEYWAQLAAALA

SEQ ID NO: 1936 - protein, 17 aa, Artificial Sequence
  Description of Artificial Sequence: Synthetic peptide
  N-term Ac
  MOD_RES (6)..(6): Alpha-Me R-azide 1,4 triazole (6 carbon) alanine olefin amino acid connected by an all-carbon crosslinker comprising one double bond
  misc_feature (6)..(13): Crosslink between residues
  MOD_RES (13)..(13): Alpha-Me alkyne 1,4 triazole (5 carbon) alanine olefin amino acid connected by an all-carbon crosslinker comprising one double bond
  MOD_RES (16)..(16): Norleucine
  C-term NH2
AALTFAEYWAQLAAALA

SEQ ID NO: 1937 - protein, 18 aa, Artificial Sequence
  Description of Artificial Sequence: Synthetic peptide
  N-term Ac
  MOD_RES (7)..(7): Alpha-Me R-azide 1,4 triazole (6 carbon) alanine olefin amino acid connected by an all-carbon crosslinker comprising one double bond
  misc_feature (7)..(14): Crosslink between residues
  MOD_RES (14)..(14): Alpha-Me alkyne 1,4 triazole (5 carbon) alanine olefin amino acid connected by an all-carbon crosslinker comprising one double bond
  MOD_RES (18)..(18): Norleucine
  C-term NH2
AAALTFAEYWAQLAAALA

SEQ ID NO: 1938 - protein, 16 aa, Artificial Sequence
  Description of Artificial Sequence: Synthetic peptide
  N-term Ac
  MOD_RES (4)..(4): Alpha-Me R-azide 1,4 triazole (6 carbon) alanine olefin amino acid connected by an all-carbon crosslinker comprising one double bond
  misc_feature (4)..(11): Crosslink between residues
  MOD_RES (11)..(11): Alpha-Me alkyne 1,4 triazole (5 carbon) alanine olefin amino acid connected by an all-carbon crosslinker comprising one double bond
  MOD_RES (14)..(14): Norleucine
  C-term NH2
LTFAEYWAQLAAALAA

SEQ ID NO: 1939 - protein, 17 aa, Artificial Sequence
  Description of Artificial Sequence: Synthetic peptide
  N-term Ac
  MOD_RES (5)..(5): Alpha-Me R-azide 1,4 triazole (6 carbon) alanine olefin amino acid connected by an all-carbon crosslinker comprising one double bond
  misc_feature (5)..(12): Crosslink between residues
  MOD_RES (12)..(12): Alpha-Me alkyne 1,4 triazole (5 carbon) alanine olefin amino acid connected by an all-carbon crosslinker comprising one double bond
  MOD_RES (15)..(15): Norleucine
  C-term NH2
ALTFAEYWAQLAAALAA

SEQ ID NO: 1940 - protein, 18 aa, Artificial Sequence
  Description of Artificial Sequence: Synthetic peptide
  N-term Ac
  MOD_RES (6)..(6): Alpha-Me R-azide 1,4 triazole (6 carbon) alanine olefin amino acid connected by an all-carbon crosslinker comprising one double bond
  misc_feature (6)..(13): Crosslink between residues
  MOD_RES (13)..(13): Alpha-Me alkyne 1,4 triazole (5 carbon) alanine olefin amino acid connected by an all-carbon crosslinker comprising one double bond
  MOD_RES (16)..(16): Norleucine
  C-term NH2
AALTFAEYWAQLAAALAA

SEQ ID NO: 1941 - protein, 16 aa, Artificial Sequence
  Description of Artificial Sequence: Synthetic peptide
  N-term Ac
  MOD_RES (4)..(4): Alpha-Me R-azide 1,4 triazole (6 carbon) alanine olefin amino acid connected by an all-carbon crosslinker comprising one double bond
  misc_feature (4)..(11): Crosslink between residues
  MOD_RES (10)..(10): Cyclobutyl-Ala
  MOD_RES (11)..(11): Alpha-Me alkyne 1,4 triazole (5 carbon) alanine olefin amino acid connected by an all-carbon crosslinker comprising one double bond
  MOD_RES (14)..(14): Norleucine
  C-term NH2
LTFAEYWAQAAAALAA

SEQ ID NO: 1942 - protein, 16 aa, Artificial Sequence
  Description of Artificial Sequence: Synthetic peptide
  N-term Ac
  MOD_RES (4)..(4): Alpha-Me R-azide 1,4 triazole (6 carbon) alanine olefin amino acid connected by an all-carbon crosslinker comprising one double bond
  misc_feature (4)..(11): Crosslink between residues
  MOD_RES (10)..(10): homo-Leu
  MOD_RES (11)..(11): Alpha-Me alkyne 1,4 triazole (5 carbon) alanine olefin amino acid connected by an all-carbon crosslinker comprising one double bond
  MOD_RES (14)..(14): Norleucine
  C-term NH2
LTFAEYWAQLAAALAA

SEQ ID NO: 1943 - protein, 17 aa, Artificial Sequence
  Description of Artificial Sequence: Synthetic peptide
  N-term Ac
  MOD_RES (5)..(5): Alpha-Me R-azide 1,4 triazole (6 carbon) alanine olefin amino acid connected by an all-carbon crosslinker comprising one double bond
  misc_feature (5)..(12): Crosslink between residues
  MOD_RES (11)..(11): homo-Leu
  MOD_RES (12)..(12): Alpha-Me alkyne 1,4 triazole (5 carbon) alanine olefin amino acid connected by an all-carbon crosslinker comprising one double bond
  MOD_RES (15)..(15): Norleucine
  C-term NH2
ALTFAEYWAQLAAALAA

SEQ ID NO: 1944 - protein, 15 aa, Artificial Sequence
  Description of Artificial Sequence: Synthetic peptide
  N-term Ac
  MOD_RES (4)..(4): Alpha-Me R-azide 1,4 triazole (6 carbon) alanine olefin amino acid connected by an all-carbon crosslinker comprising one double bond
  misc_feature (4)..(11): Crosslink between residues
  MOD_RES (6)..(6): N-methyl-Tyr
  MOD_RES (11)..(11): Alpha-Me alkyne 1,4 triazole (5 carbon) alanine olefin amino acid connected by an all-carbon crosslinker comprising one double bond
  MOD_RES (14)..(14): Norleucine
  C-term NH2
LTFAAYWAQLAAALA

SEQ ID NO: 1945 - protein, 15 aa, Artificial Sequence
  Description of Artificial Sequence: Synthetic peptide
  N-term Ac
  MOD_RES (4)..(4): Alpha-Me R-azide 1,4 triazole (6 carbon) alanine olefin amino acid connected by an all-carbon crosslinker comprising one double bond
  misc_feature (4)..(11): Crosslink between residues
  MOD_RES (6)..(6): N-methyl-Tyr
  MOD_RES (11)..(11): Alpha-Me alkyne 1,4 triazole (5 carbon) alanine olefin amino acid connected by an all-carbon crosslinker comprising one double bond
  MOD_RES (14)..(14): Norleucine
  C-term NH2
LTFAAYWAQLAAALA

SEQ ID NO: 1946 - protein, 15 aa, Artificial Sequence
  Description of Artificial Sequence: Synthetic peptide
  N-term Ac
  MOD_RES (4)..(4): Alpha-Me R-azide 1,4 triazole (6 carbon) alanine olefin amino acid connected by an all-carbon crosslinker comprising one double bond
  misc_feature (4)..(11): Crosslink between residues
  MOD_RES (7)..(7): N-methyl-Trp
  MOD_RES (11)..(11): Alpha-Me alkyne 1,4 triazole (5 carbon) alanine olefin amino acid connected by an all-carbon crosslinker comprising one double bond
  MOD_RES (14)..(14): Norleucine
  C-term NH2
LTFAAYWAQLAAALA

SEQ ID NO: 1947 - protein, 15 aa, Artificial Sequence
  Description of Artificial Sequence: Synthetic peptide
  N-term Ac
  MOD_RES (4)..(4): Alpha-Me R-azide 1,4 triazole (6 carbon) alanine olefin amino acid connected by an all-carbon crosslinker comprising one double bond
  misc_feature (4)..(11): Crosslink between residues
  MOD_RES (7)..(7): N-methyl-Trp
  MOD_RES (11)..(11): Alpha-Me alkyne 1,4 triazole (5 carbon) alanine olefin amino acid connected by an all-carbon crosslinker comprising one double bond
  MOD_RES (14)..(14): Norleucine
  C-term NH2
LTFAAYWAQLAAALA

SEQ ID NO: 1948 - protein, 15 aa, Artificial Sequence
  Description of Artificial Sequence: Synthetic peptide
  N-term Ac
  MOD_RES (4)..(4): Alpha-Me R-azide 1,4 triazole (6 carbon) alanine olefin amino acid connected by an all-carbon crosslinker comprising one double bond
  misc_feature (4)..(11): Crosslink between residues
  MOD_RES (7)..(7): Alpha-Me-Trp
  MOD_RES (11)..(11): Alpha-Me alkyne 1,4 triazole (5 carbon) alanine olefin amino acid connected by an all-carbon crosslinker comprising one double bond
  MOD_RES (14)..(14): Norleucine
  C-term NH2
LTFAAYWAQLAAALA

SEQ ID NO: 1949 - protein, 15 aa, Artificial Sequence
  Description of Artificial Sequence: Synthetic peptide
  N-term Ac
  MOD_RES (4)..(4): Alpha-Me R-azide 1,4 triazole (6 carbon) alanine olefin amino acid connected by an all-carbon crosslinker comprising one double bond
  misc_feature (4)..(11): Crosslink between residues
  MOD_RES (7)..(7): Alpha-Me-Trp
  MOD_RES (11)..(11): Alpha-Me alkyne 1,4 triazole (5 carbon) alanine olefin amino acid connected by an all-carbon crosslinker comprising one double bond
  MOD_RES (14)..(14): Norleucine
  C-term NH2
LTFAAYWAQLAAALA

SEQ ID NO: 1950 - protein, 15 aa, Artificial Sequence
  Description of Artificial Sequence: Synthetic peptide
  N-term Ac
  MOD_RES (4)..(4): Alpha-Me R-azide 1,4 triazole (6 carbon) alanine olefin amino acid connected by an all-carbon crosslinker comprising one double bond
  misc_feature (4)..(11): Crosslink between residues
  MOD_RES (8)..(8): 2-aminoisobutyric acid
  MOD_RES (11)..(11): Alpha-Me alkyne 1,4 triazole (5 carbon) alanine olefin amino acid connected by an all-carbon crosslinker comprising one double bond
  MOD_RES (14)..(14): Norleucine
  C-term NH2
LTFAAYWXQLAAALA

SEQ ID NO: 1951 - protein, 15 aa, Artificial Sequence
  Description of Artificial Sequence: Synthetic peptide
  N-term Ac
  MOD_RES (4)..(4): Alpha-Me R-azide 1,4 triazole (6 carbon) alanine olefin amino acid connected by an all-carbon crosslinker comprising one double bond
  misc_feature (4)..(11): Crosslink between residues
  MOD_RES (8)..(8): 2-aminoisobutyric acid
  MOD_RES (11)..(11): Alpha-Me alkyne 1,4 triazole (5 carbon) alanine olefin amino acid connected by an all-carbon crosslinker comprising one double bond
  MOD_RES (14)..(14): Norleucine
  C-term NH2
LTFAAYWXQLAAALA

SEQ ID NO: 1952 - protein, 15 aa, Artificial Sequence
  Description of Artificial Sequence: Synthetic peptide
  N-term Ac
  MOD_RES (4)..(4): Alpha-Me R-azide 1,4 triazole (6 carbon) alanine olefin amino acid connected by an all-carbon crosslinker comprising one double bond
  misc_feature (4)..(11): Crosslink between residues
  MOD_RES (11)..(11): Alpha-Me alkyne 1,4 triazole (5 carbon) alanine olefin amino acid connected by an all-carbon crosslinker comprising one double bond
  MOD_RES (13)..(13): 2-aminoisobutyric acid
  MOD_RES (14)..(14): Norleucine
  C-term NH2
LTFAAYWAQLAAXLA

SEQ ID NO: 1953 - protein, 15 aa, Artificial Sequence
  Description of Artificial Sequence: Synthetic peptide
  N-term Ac
  MOD_RES (4)..(4): Alpha-Me R-azide 1,4 triazole (6 carbon) alanine olefin amino acid connected by an all-carbon crosslinker comprising one double bond
  misc_feature (4)..(11): Crosslink between residues
  MOD_RES (11)..(11): Alpha-Me alkyne 1,4 triazole (5 carbon) alanine olefin amino acid connected by an all-carbon crosslinker comprising one double bond
  MOD_RES (13)..(13): 2-aminoisobutyric acid
  MOD_RES (14)..(14): Norleucine
  C-term NH2
LTFAAYWAQLAAXLA

SEQ ID NO: 1954 - protein, 15 aa, Artificial Sequence
  Description of Artificial Sequence: Synthetic peptide
  N-term Ac
  MOD_RES (4)..(4): Alpha-Me R-azide 1,4 triazole (6 carbon) alanine olefin amino acid connected by an all-carbon crosslinker comprising one double bond
  misc_feature (4)..(11): Crosslink between residues
  MOD_RES (11)..(11): Alpha-Me alkyne 1,4 triazole (5 carbon) alanine olefin amino acid connected by an all-carbon crosslinker comprising one double bond
  MOD_RES (13)..(13): D-amino acid
  MOD_RES (14)..(14): Norleucine
  C-term NH2
LTFAAYWAQLAAALA

SEQ ID NO: 1955 - protein, 15 aa, Artificial Sequence
  Description of Artificial Sequence: Synthetic peptide
  N-term Ac
  MOD_RES (4)..(4): Alpha-Me R-azide 1,4 triazole (6 carbon) alanine olefin amino acid connected by an all-carbon crosslinker comprising one double bond
  misc_feature (4)..(11): Crosslink between residues
  MOD_RES (11)..(11): Alpha-Me alkyne 1,4 triazole (5 carbon) alanine olefin amino acid connected by an all-carbon crosslinker comprising one double bond
  MOD_RES (13)..(13): D-amino acid
  MOD_RES (14)..(14): Norleucine
  C-term NH2
LTFAAYWAQLAAALA

SEQ ID NO: 1956 - protein, 15 aa, Artificial Sequence
  Description of Artificial Sequence: Synthetic peptide
  N-term Ac
  MOD_RES (4)..(4): Alpha-Me R-azide 1,4 triazole (6 carbon) alanine olefin amino acid connected by an all-carbon crosslinker comprising one double bond
  misc_feature (4)..(11): Crosslink between residues
  MOD_RES (11)..(11): Alpha-Me alkyne 1,4 triazole (5 carbon) alanine olefin amino acid connected by an all-carbon crosslinker comprising one double bond
  MOD_RES (13)..(13): Sarcosine
  MOD_RES (14)..(14): Norleucine
  C-term NH2
LTFAAYWAQLAAXLA

SEQ ID NO: 1957 - protein, 15 aa, Artificial Sequence
  Description of Artificial Sequence: Synthetic peptide
  N-term Ac
  MOD_RES (4)..(4): Alpha-Me R-azide 1,4 triazole (6 carbon) alanine olefin amino acid connected by an all-carbon crosslinker comprising one double bond
  misc_feature (4)..(11): Crosslink between residues
  MOD_RES (11)..(11): Alpha-Me alkyne 1,4 triazole (5 carbon) alanine olefin amino acid connected by an all-carbon crosslinker comprising one double bond
  MOD_RES (13)..(13): Sarcosine
  MOD_RES (14)..(14): Norleucine
  C-term NH2
LTFAAYWAQLAAXLA

SEQ ID NO: 1958 - protein, 15 aa, Artificial Sequence
  Description of Artificial Sequence: Synthetic peptide
  N-term Ac
  MOD_RES (4)..(4): Alpha-Me R-azide 1,4 triazole (6 carbon) alanine olefin amino acid connected by an all-carbon crosslinker comprising one double bond
  misc_feature (4)..(11): Crosslink between residues
  MOD_RES (11)..(11): Alpha-Me alkyne 1,4 triazole (5 carbon) alanine olefin amino acid connected by an all-carbon crosslinker comprising one double bond
  MOD_RES (14)..(14): Norleucine
  MOD_RES (15)..(15): 2-aminoisobutyric acid
  C-term NH2
LTFAAYWAQLAAALX

SEQ ID NO: 1959 - protein, 15 aa, Artificial Sequence
  Description of Artificial Sequence: Synthetic peptide
  N-term Ac
  MOD_RES (4)..(4): Alpha-Me R-azide 1,4 triazole (6 carbon) alanine olefin amino acid connected by an all-carbon crosslinker comprising one double bond
  misc_feature (4)..(11): Crosslink between residues
  MOD_RES (11)..(11): Alpha-Me alkyne 1,4 triazole (5 carbon) alanine olefin amino acid connected by an all-carbon crosslinker comprising one double bond
  MOD_RES (14)..(14): Norleucine
  MOD_RES (15)..(15): 2-aminoisobutyric acid
  C-term NH2
LTFAAYWAQLAAALX

SEQ ID NO: 1960 - protein, 15 aa, Artificial Sequence
  Description of Artificial Sequence: Synthetic peptide
  N-term Ac
  MOD_RES (4)..(4): Alpha-Me R-azide 1,4 triazole (6 carbon) alanine olefin amino acid connected by an all-carbon crosslinker comprising one double bond
  misc_feature (4)..(11): Crosslink between residues
  MOD_RES (11)..(11): Alpha-Me alkyne 1,4 triazole (5 carbon) alanine olefin amino acid connected by an all-carbon crosslinker comprising one double bond
  MOD_RES (14)..(14): Norleucine
  MOD_RES (15)..(15): N-methyl-Ala
  C-term NH2
LTFAAYWAQLAAALA

SEQ ID NO: 1961 - protein, 15 aa, Artificial Sequence
  Description of Artificial Sequence: Synthetic peptide
  N-term Ac
  MOD_RES (4)..(4): Alpha-Me R-azide 1,4 triazole (6 carbon) alanine olefin amino acid connected by an all-carbon crosslinker comprising one double bond
  misc_feature (4)..(11): Crosslink between residues
  MOD_RES (11)..(11): Alpha-Me alkyne 1,4 triazole (5 carbon) alanine olefin amino acid connected by an all-carbon crosslinker comprising one double bond
  MOD_RES (14)..(14): Norleucine
  MOD_RES (15)..(15): N-methyl-Ala
  C-term NH2
LTFAAYWAQLAAALA

SEQ ID NO: 1962 - protein, 15 aa, Artificial Sequence
  Description of Artificial Sequence: Synthetic peptide
  N-term Ac
  MOD_RES (4)..(4): Alpha-Me R-azide 1,4 triazole (6 carbon) alanine olefin amino acid connected by an all-carbon crosslinker comprising one double bond
  misc_feature (4)..(11): Crosslink between residues
  MOD_RES (11)..(11): Alpha-Me alkyne 1,4 triazole (5 carbon) alanine olefin amino acid connected by an all-carbon crosslinker comprising one double bond
  MOD_RES (14)..(14): Norleucine
  MOD_RES (15)..(15): Sarcosine
  C-term NH2
LTFAAYWAQLAAALX

SEQ ID NO: 1963 - protein, 15 aa, Artificial Sequence
  Description of Artificial Sequence: Synthetic peptide
  N-term Ac
  MOD_RES (4)..(4): Alpha-Me R-azide 1,4 triazole (6 carbon) alanine olefin amino acid connected by an all-carbon crosslinker comprising one double bond
  misc_feature (4)..(11): Crosslink between residues
  MOD_RES (11)..(11): Alpha-Me alkyne 1,4 triazole (5 carbon) alanine olefin amino acid connected by an all-carbon crosslinker comprising one double bond
  MOD_RES (14)..(14): Norleucine
  MOD_RES (15)..(15): Sarcosine
  C-term NH2
LTFAAYWAQLAAALX

SEQ ID NO: 1964 - protein, 16 aa, Artificial Sequence
  Description of Artificial Sequence: Synthetic peptide
  N-term Ac
  MOD_RES (4)..(4): Alpha-Me R-azide 1,4 triazole (6 carbon) alanine olefin amino acid connected by an all-carbon crosslinker comprising one double bond
  misc_feature (4)..(11): Crosslink between residues
  MOD_RES (11)..(11): Alpha-Me alkyne 1,4 triazole (5 carbon) alanine olefin amino acid connected by an all-carbon crosslinker comprising one double bond
  MOD_RES (14)..(14): Norleucine
  MOD_RES (16)..(16): 2-aminoisobutyric acid
  C-term NH2
LTFAAYWAQLAAALAX

SEQ ID NO: 1965 - protein, 16 aa, Artificial Sequence
  Description of Artificial Sequence: Synthetic peptide
  N-term Ac
  MOD_RES (4)..(4): Alpha-Me R-azide 1,4 triazole (6 carbon) alanine olefin amino acid connected by an all-carbon crosslinker comprising one double bond
  misc_feature (4)..(11): Crosslink between residues
  MOD_RES (11)..(11): Alpha-Me alkyne 1,4 triazole (5 carbon) alanine olefin amino acid connected by an all-carbon crosslinker comprising one double bond
  MOD_RES (14)..(14): Norleucine
  MOD_RES (16)..(16): 2-aminoisobutyric acid
  C-term NH2
LTFAAYWAQLAAALAX

SEQ ID NO: 1966 - protein, 16 aa, Artificial Sequence
  Description of Artificial Sequence: Synthetic peptide
  N-term Ac
  MOD_RES (4)..(4): Alpha-Me R-azide 1,4 triazole (6 carbon) alanine olefin amino acid connected by an all-carbon crosslinker comprising one double bond
  misc_feature (4)..(11): Crosslink between residues
  MOD_RES (11)..(11): Alpha-Me alkyne 1,4 triazole (5 carbon) alanine olefin amino acid connected by an all-carbon crosslinker comprising one double bond
  MOD_RES (14)..(14): Norleucine
  MOD_RES (16)..(16): N-methyl-Ala
  C-term NH2
LTFAAYWAQLAAALAA

SEQ ID NO: 1967 - protein, 16 aa, Artificial Sequence
  Description of Artificial Sequence: Synthetic peptide
  N-term Ac
  MOD_RES (4)..(4): Alpha-Me R-azide 1,4 triazole (6 carbon) alanine olefin amino acid connected by an all-carbon crosslinker comprising one double bond
  misc_feature (4)..(11): Crosslink between residues
  MOD_RES (11)..(11): Alpha-Me alkyne 1,4 triazole (5 carbon) alanine olefin amino acid connected by an all-carbon crosslinker comprising one double bond
  MOD_RES (14)..(14): Norleucine
  MOD_RES (16)..(16): N-methyl-Ala
  C-term NH2
LTFAAYWAQLAAALAA

SEQ ID NO: 1968 - protein, 16 aa, Artificial Sequence
  Description of Artificial Sequence: Synthetic peptide
  N-term Ac
  MOD_RES (4)..(4): Alpha-Me R-azide 1,4 triazole (6 carbon) alanine olefin amino acid connected by an all-carbon crosslinker comprising one double bond
  misc_feature (4)..(11): Crosslink between residues
  MOD_RES (11)..(11): Alpha-Me alkyne 1,4 triazole (5 carbon) alanine olefin amino acid connected by an all-carbon crosslinker comprising one double bond
  MOD_RES (14)..(14): Norleucine
  MOD_RES (16)..(16): D-amino acid
  C-term NH2
LTFAAYWAQLAAALAA

SEQ ID NO: 1969 - protein, 16 aa, Artificial Sequence
  Description of Artificial Sequence: Synthetic peptide
  N-term Ac
  MOD_RES (4)..(4): Alpha-Me R-azide 1,4 triazole (6 carbon) alanine olefin amino acid connected by an all-carbon crosslinker comprising one double bond
  misc_feature (4)..(11): Crosslink between residues
  MOD_RES (11)..(11): Alpha-Me alkyne 1,4 triazole (5 carbon) alanine olefin amino acid connected by an all-carbon crosslinker comprising one double bond
  MOD_RES (14)..(14): Norleucine
  MOD_RES (16)..(16): D-amino acid
  C-term NH2
LTFAAYWAQLAAALAA

SEQ ID NO: 1970 - protein, 16 aa, Artificial Sequence
  Description of Artificial Sequence: Synthetic peptide
  N-term Ac
  MOD_RES (4)..(4): Alpha-Me R-azide 1,4 triazole (6 carbon) alanine olefin amino acid connected by an all-carbon crosslinker comprising one double bond
  misc_feature (4)..(11): Crosslink between residues
  MOD_RES (11)..(11): Alpha-Me alkyne 1,4 triazole (5 carbon) alanine olefin amino acid connected by an all-carbon crosslinker comprising one double bond
  MOD_RES (14)..(14): Norleucine
  MOD_RES (16)..(16): Sarcosine
  C-term NH2
LTFAAYWAQLAAALAX

SEQ ID NO: 1971 - protein, 16 aa, Artificial Sequence
  Description of Artificial Sequence: Synthetic peptide
  N-term Ac
  MOD_RES (4)..(4): Alpha-Me R-azide 1,4 triazole (6 carbon) alanine olefin amino acid connected by an all-carbon crosslinker comprising one double bond
  misc_feature (4)..(11): Crosslink between residues
  MOD_RES (11)..(11): Alpha-Me alkyne 1,4 triazole (5 carbon) alanine olefin amino acid connected by an all-carbon crosslinker comprising one double bond
  MOD_RES (14)..(14): Norleucine
  MOD_RES (16)..(16): Sarcosine
  C-term NH2
LTFAAYWAQLAAALAX

SEQ ID NO: 1972 - protein, 15 aa, Artificial Sequence
  Description of Artificial Sequence: Synthetic peptide
  N-term Ac
  MOD_RES (4)..(4): Alpha-Me R-azide 1,4 triazole (6 carbon) alanine olefin amino acid connected by an all-carbon crosslinker comprising one double bond
  misc_feature (4)..(11): Crosslink between residues
  MOD_RES (5)..(5): Cou4
  MOD_RES (11)..(11): Alpha-Me alkyne 1,4 triazole (5 carbon) alanine olefin amino acid connected by an all-carbon crosslinker comprising one double bond
  MOD_RES (14)..(14): Norleucine
  C-term NH2
LTFAXYWAQLAAALA

SEQ ID NO: 1973 - protein, 15 aa, Artificial Sequence
  Description of Artificial Sequence: Synthetic peptide
  N-term Ac
  MOD_RES (4)..(4): Alpha-Me R-azide 1,4 triazole (6 carbon) alanine olefin amino acid connected by an all-carbon crosslinker comprising one double bond
  misc_feature (4)..(11): Crosslink between residues
  MOD_RES (5)..(5): Cou4
  MOD_RES (11)..(11): Alpha-Me alkyne 1,4 triazole (5 carbon) alanine olefin amino acid connected by an all-carbon crosslinker comprising one double bond
  MOD_RES (14)..(14): Norleucine
  C-term NH2
LTFAXYWAQLAAALA

SEQ ID NO: 1974 - protein, 15 aa, Artificial Sequence
  Description of Artificial Sequence: Synthetic peptide
  N-term Ac
  MOD_RES (4)..(4): Alpha-Me R-azide 1,4 triazole (6 carbon) alanine olefin amino acid connected by an all-carbon crosslinker comprising one double bond
  misc_feature (4)..(11): Crosslink between residues
  MOD_RES (8)..(8): Cou4
  MOD_RES (11)..(11): Alpha-Me alkyne 1,4 triazole (5 carbon) alanine olefin amino acid connected by an all-carbon crosslinker comprising one double bond
  MOD_RES (14)..(14): Norleucine
  C-term NH2
LTFAAYWXQLAAALA

SEQ ID NO: 1975 - protein, 15 aa, Artificial Sequence
  Description of Artificial Sequence: Synthetic peptide
  N-term Ac
  MOD_RES (4)..(4): Alpha-Me R-azide 1,4 triazole (6 carbon) alanine olefin amino acid connected by an all-carbon crosslinker comprising one double bond
  misc_feature (4)..(11): Crosslink between residues
  MOD_RES (11)..(11): Alpha-Me alkyne 1,4 triazole (5 carbon) alanine olefin amino acid connected by an all-carbon crosslinker comprising one double bond
  MOD_RES (12)..(12): Cou4
  MOD_RES (14)..(14): Norleucine
  C-term NH2
LTFAAYWAQLAXALA

SEQ ID NO: 1976 - protein, 15 aa, Artificial Sequence
  Description of Artificial Sequence: Synthetic peptide
  N-term Ac
  MOD_RES (4)..(4): Alpha-Me R-azide 1,4 triazole (6 carbon) alanine olefin amino acid connected by an all-carbon crosslinker comprising one double bond
  misc_feature (4)..(11): Crosslink between residues
  MOD_RES (11)..(11): Alpha-Me alkyne 1,4 triazole (5 carbon) alanine olefin amino acid connected by an all-carbon crosslinker comprising one double bond
  MOD_RES (12)..(12): Cou4
  MOD_RES (14)..(14): Norleucine
  C-term NH2
LTFAAYWAQLAXALA

SEQ ID NO: 1977 - protein, 15 aa, Artificial Sequence
  Description of Artificial Sequence: Synthetic peptide
  N-term Ac
  MOD_RES (4)..(4): Alpha-Me R-azide 1,4 triazole (6 carbon) alanine olefin amino acid connected by an all-carbon crosslinker comprising one double bond
  misc_feature (4)..(11): Crosslink between residues
  MOD_RES (11)..(11): Alpha-Me alkyne 1,4 triazole (5 carbon) alanine olefin amino acid connected by an all-carbon crosslinker comprising one double bond
  MOD_RES (13)..(13): Cou4
  MOD_RES (14)..(14): Norleucine
  C-term NH2
LTFAAYWAQLAAXLA

SEQ ID NO: 1978 - protein, 15 aa, Artificial Sequence
  Description of Artificial Sequence: Synthetic peptide
  N-term Ac
  MOD_RES (4)..(4): Alpha-Me R-azide 1,4 triazole (6 carbon) alanine olefin amino acid connected by an all-carbon crosslinker comprising one double bond
  misc_feature (4)..(11): Crosslink between residues
  MOD_RES (11)..(11): Alpha-Me alkyne 1,4 triazole (5 carbon) alanine olefin amino acid connected by an all-carbon crosslinker comprising one double bond
  MOD_RES (13)..(13): Cou4
  MOD_RES (14)..(14): Norleucine
  C-term NH2
LTFAAYWAQLAAXLA

SEQ ID NO: 1979 - protein, 15 aa, Artificial Sequence
  Description of Artificial Sequence: Synthetic peptide
  N-term Ac
  MOD_RES (4)..(4): Alpha-Me R-azide 1,4 triazole (6 carbon) alanine olefin amino acid connected by an all-carbon crosslinker comprising one double bond
  misc_feature (4)..(11): Crosslink between residues
  MOD_RES (11)..(11): Alpha-Me alkyne 1,4 triazole (5 carbon) alanine olefin amino acid connected by an all-carbon crosslinker comprising one double bond
  MOD_RES (14)..(14): Norleucine
  C-term OH
LTFAAYWAQLAAALA

SEQ ID NO: 1980 - protein, 15 aa, Artificial Sequence
  Description of Artificial Sequence: Synthetic peptide
  N-term Ac
  MOD_RES (4)..(4): Alpha-Me R-azide 1,4 triazole (6 carbon) alanine olefin amino acid connected by an all-carbon crosslinker comprising one double bond
  misc_feature (4)..(11): Crosslink between residues
  MOD_RES (11)..(11): Alpha-Me alkyne 1,4 triazole (5 carbon) alanine olefin amino acid connected by an all-carbon crosslinker comprising one double bond
  MOD_RES (14)..(14): Norleucine
  C-term OH
LTFAAYWAQLAAALA

SEQ ID NO: 1981 - protein, 15 aa, Artificial Sequence
  Description of Artificial Sequence: Synthetic peptide
  N-term Ac
  MOD_RES (4)..(4): Alpha-Me R-azide 1,4 triazole (6 carbon) alanine olefin amino acid connected by an all-carbon crosslinker comprising one double bond
  misc_feature (4)..(11): Crosslink between residues
  MOD_RES (11)..(11): Alpha-Me alkyne 1,4 triazole (5 carbon) alanine olefin amino acid connected by an all-carbon crosslinker comprising one double bond
  MOD_RES (14)..(14): Norleucine
  C-term NHnPr
LTFAAYWAQLAAALA

SEQ ID NO: 1982 - protein, 15 aa, Artificial Sequence
  Description of Artificial Sequence: Synthetic peptide
  N-term Ac
  MOD_RES (4)..(4): Alpha-Me R-azide 1,4 triazole (6 carbon) alanine olefin amino acid connected by an all-carbon crosslinker comprising one double bond
  misc_feature (4)..(11): Crosslink between residues
  MOD_RES (11)..(11): Alpha-Me alkyne 1,4 triazole (5 carbon) alanine olefin amino acid connected by an all-carbon crosslinker comprising one double bond
  MOD_RES (14)..(14): Norleucine
  C-term NHnPr
LTFAAYWAQLAAALA

SEQ ID NO: 1983 - protein, 15 aa, Artificial Sequence
  Description of Artificial Sequence: Synthetic peptide
  N-term Ac
  MOD_RES (4)..(4): Alpha-Me R-azide 1,4 triazole (6 carbon) alanine olefin amino acid connected by an all-carbon crosslinker comprising one double bond
  misc_feature (4)..(11): Crosslink between residues
  MOD_RES (11)..(11): Alpha-Me alkyne 1,4 triazole (5 carbon) alanine olefin amino acid connected by an all-carbon crosslinker comprising one double bond
  MOD_RES (14)..(14): Norleucine
  C-term NHnBu33Me
LTFAAYWAQLAAALA

SEQ ID NO: 1984 - protein, 15 aa, Artificial Sequence
  Description of Artificial Sequence: Synthetic peptide
  N-term Ac
  MOD_RES (4)..(4): Alpha-Me R-azide 1,4 triazole (6 carbon) alanine olefin amino acid connected by an all-carbon crosslinker comprising one double bond
  misc_feature (4)..(11): Crosslink between residues
  MOD_RES (11)..(11): Alpha-Me alkyne 1,4 triazole (5 carbon) alanine olefin amino acid connected by an all-carbon crosslinker comprising one double bond
  MOD_RES (14)..(14): Norleucine
  C-term NHnBu33Me
LTFAAYWAQLAAALA

SEQ ID NO: 1985 - protein, 15 aa, Artificial Sequence
  Description of Artificial Sequence: Synthetic peptide
  N-term Ac
  MOD_RES (4)..(4): Alpha-Me R-azide 1,4 triazole (6 carbon) alanine olefin amino acid connected by an all-carbon crosslinker comprising one double bond
  misc_feature (4)..(11): Crosslink between residues
  MOD_RES (11)..(11): Alpha-Me alkyne 1,4 triazole (5 carbon) alanine olefin amino acid connected by an all-carbon crosslinker comprising one double bond
  MOD_RES (14)..(14): Norleucine
  C-term NHHex
LTFAAYWAQLAAALA

SEQ ID NO: 1986 - protein, 15 aa, Artificial Sequence
  Description of Artificial Sequence: Synthetic peptide
  N-term Ac
  MOD_RES (4)..(4): Alpha-Me R-azide 1,4 triazole (6 carbon) alanine olefin amino acid connected by an all-carbon crosslinker comprising one double bond
  misc_feature (4)..(11): Crosslink between residues
  MOD_RES (11)..(11): Alpha-Me alkyne 1,4 triazole (5 carbon) alanine olefin amino acid connected by an all-carbon crosslinker comprising one double bond
  MOD_RES (14)..(14): Norleucine
  N-term NHHex
LTFAAYWAQLAAALA

SEQ ID NO: 1987 - protein, 15 aa, Artificial Sequence
  Description of Artificial Sequence: Synthetic peptide
  N-term Ac
  MOD_RES (4)..(4): Alpha-Me R-azide 1,4 triazole (6 carbon) alanine olefin amino acid connected by an all-carbon crosslinker comprising one double bond
  misc_feature (4)..(11): Crosslink between residues
  MOD_RES (11)..(11): Alpha-Me alkyne 1,4 triazole (5 carbon) alanine olefin amino acid connected by an all-carbon crosslinker comprising one double bond
  MOD_RES (14)..(14): Norleucine
  C-term NH2
LTAAAYWAQLAAALA

SEQ ID NO: 1988 - protein, 15 aa, Artificial Sequence
  Description of Artificial Sequence: Synthetic peptide
  N-term Ac
  MOD_RES (3)..(3): homo-Leu
  MOD_RES (4)..(4): Alpha-Me R-azide 1,4 triazole (6 carbon) alanine olefin amino acid connected by an all-carbon crosslinker comprising one double bond
  misc_feature (4)..(11): Crosslink between residues
  MOD_RES (11)..(11): Alpha-Me alkyne 1,4 triazole (5 carbon) alanine olefin amino acid connected by an all-carbon crosslinker comprising one double bond
  MOD_RES (14)..(14): Norleucine
  C-term NH2
LTLAAYWAQLAAALA

SEQ ID NO: 1989 - protein, 15 aa, Artificial Sequence
  Description of Artificial Sequence: Synthetic peptide
  N-term Ac
  MOD_RES (4)..(4): Alpha-Me R-azide 1,4 triazole (6 carbon) alanine olefin amino acid connected by an all-carbon crosslinker comprising one double bond
  misc_feature (4)..(11): Crosslink between residues
  MOD_RES (11)..(11): Alpha-Me alkyne 1,4 triazole (5 carbon) alanine olefin amino acid connected by an all-carbon crosslinker comprising one double bond
  MOD_RES (14)..(14): Norleucine
  C-term NH2
LTFAAYAAQLAAALA

SEQ ID NO: 1990 - protein, 15 aa, Artificial Sequence
  Description of Artificial Sequence: Synthetic peptide
  N-term Ac
  MOD_RES (4)..(4): Alpha-Me R-azide 1,4 triazole (6 carbon) alanine olefin amino acid connected by an all-carbon crosslinker comprising one double bond
  misc_feature (4)..(11): Crosslink between residues
  MOD_RES (7)..(7): 2Nal
  MOD_RES (11)..(11): Alpha-Me alkyne 1,4 triazole (5 carbon) alanine olefin amino acid connected by an all-carbon crosslinker comprising one double bond
  MOD_RES (14)..(14): Norleucine
  C-term NH2
LTFAAYAAQLAAALA

SEQ ID NO: 1991 - protein, 14 aa, Artificial Sequence
  Description of Artificial Sequence: Synthetic peptide
  N-term Ac
  MOD_RES (4)..(4): Alpha-Me R-azide 1,4 triazole (6 carbon) alanine olefin amino acid connected by an all-carbon crosslinker comprising one double bond
  misc_feature (4)..(11): Crosslink between residues
  MOD_RES (8)..(8): Cou4
  MOD_RES (10)..(10): Cyclobutyl-Ala
  MOD_RES (11)..(11): Alpha-Me alkyne 1,4 triazole (5 carbon) alanine olefin amino acid connected by an all-carbon crosslinker comprising one double bond
  C-term NH2
LTFAEYWXQAASAA

SEQ ID NO: 1992 - protein, 14 aa, Artificial Sequence
  Description of Artificial Sequence: Synthetic peptide
  N-term Ac
  MOD_RES (4)..(4): Alpha-Me R-azide 1,4 triazole (6 carbon) alanine olefin amino acid connected by an all-carbon crosslinker comprising one double bond
  misc_feature (4)..(11): Crosslink between residues
  MOD_RES (8)..(8): Cou7
  MOD_RES (10)..(10): Cyclobutyl-Ala
  MOD_RES (11)..(11): Alpha-Me alkyne 1,4 triazole (5 carbon) alanine olefin amino acid connected by an all-carbon crosslinker comprising one double bond
  C-term NH2
LTFAEYWXQAASAA

SEQ ID NO: 1993 - protein, 14 aa, Artificial Sequence
  Description of Artificial Sequence: Synthetic peptide
  N-term Dmaac
  MOD_RES (4)..(4): Alpha-Me R-azide 1,4 triazole (6 carbon) alanine olefin amino acid connected by an all-carbon crosslinker comprising one double bond
  misc_feature (4)..(11): Crosslink between residues
  MOD_RES (10)..(10): Cyclobutyl-Ala
  MOD_RES (11)..(11): Alpha-Me alkyne 1,4 triazole (5 carbon) alanine olefin amino acid connected by an all-carbon crosslinker comprising one double bond
  C-term NH2
LTFAEYWAQAASAA

SEQ ID NO: 1994 - protein, 17 aa, Artificial Sequence
  Description of Artificial Sequence: Synthetic peptide
  N-term Dmaac
  MOD_RES (4)..(4): Alpha-Me R-azide 1,4 triazole (6 carbon) alanine olefin amino acid connected by an all-carbon crosslinker comprising one double bond
  misc_feature (4)..(11): Crosslink between residues
  MOD_RES (11)..(11): Alpha-Me alkyne 1,4 triazole (5 carbon) alanine olefin amino acid connected by an all-carbon crosslinker comprising one double bond
  MOD_RES (17)..(17): D-amino acid
  C-term NH2
LTFAAYWAQLAAAAAAA

SEQ ID NO: 1995 - protein, 17 aa, Artificial Sequence
  Description of Artificial Sequence: Synthetic peptide
  N-term Dmaac
  MOD_RES (4)..(4): Alpha-Me R-azide 1,4 triazole (6 carbon) alanine olefin amino acid connected by an all-carbon crosslinker comprising one double bond
  misc_feature (4)..(11): Crosslink between residues
  MOD_RES (11)..(11): Alpha-Me alkyne 1,4 triazole (5 carbon) alanine olefin amino acid connected by an all-carbon crosslinker comprising one double bond
  MOD_RES (17)..(17): D-amino acid
  C-term NH2
LTFAAYWAQLAAAAAAA

SEQ ID NO: 1996 - protein, 17 aa, Artificial Sequence
  Description of Artificial Sequence: Synthetic peptide
  N-term Dmaac
  MOD_RES (4)..(4): Alpha-Me R-azide 1,4 triazole (6 carbon) alanine olefin amino acid connected by an all-carbon crosslinker comprising one double bond
  misc_feature (4)..(11): Crosslink between residues
  MOD_RES (11)..(11): Alpha-Me alkyne 1,4 triazole (5 carbon) alanine olefin amino acid connected by an all-carbon crosslinker comprising one double bond
  MOD_RES (17)..(17): D-amino acid
  C-term NH2
LTFAEYWAQLAAAAAAA

SEQ ID NO: 1997 - protein, 17 aa, Artificial Sequence
  Description of Artificial Sequence: Synthetic peptide
  N-term Dmaac
  MOD_RES (4)..(4): Alpha-Me R-azide 1,4 triazole (6 carbon) alanine olefin amino acid connected by an all-carbon crosslinker comprising one double bond
  misc_feature (4)..(11): Crosslink between residues
  MOD_RES (11)..(11): Alpha-Me alkyne 1,4 triazole (5 carbon) alanine olefin amino acid connected by an all-carbon crosslinker comprising one double bond
  MOD_RES (17)..(17): D-amino acid
  C-term NH2
LTFAEYWAQLAAAAAAA

SEQ ID NO: 1998 - protein, 15 aa, Artificial Sequence
  Description of Artificial Sequence: Synthetic peptide
  N-term Dmaac
  MOD_RES (4)..(4): Alpha-Me R-azide 1,4 triazole (6 carbon) alanine olefin amino acid connected by an all-carbon crosslinker comprising one double bond
  misc_feature (4)..(11): Crosslink between residues
  MOD_RES (6)..(6): 4-carboxy-Phe
  MOD_RES (10)..(10): Cyclobutyl-Ala
  MOD_RES (11)..(11): Alpha-Me alkyne 1,4 triazole (5 carbon) alanine olefin amino acid connected by an all-carbon crosslinker comprising one double bond
  MOD_RES (15)..(15): D-amino acid
  C-term NH2
LTFAEFWAQAAAAIA

SEQ ID NO: 1999 - protein, 15 aa, Artificial Sequence
  Description of Artificial Sequence: Synthetic peptide
  N-term Dmaac
  MOD_RES (4)..(4): Alpha-Me R-azide 1,4 triazole (6 carbon) alanine olefin amino acid connected by an all-carbon crosslinker comprising one double bond
  misc_feature (4)..(11): Crosslink between residues
  MOD_RES (6)..(6): 4-carboxy-Phe
  MOD_RES (10)..(10): Cyclobutyl-Ala
  MOD_RES (11)..(11): Alpha-Me alkyne 1,4 triazole (5 carbon) alanine olefin amino acid connected by an all-carbon crosslinker comprising one double bond
  MOD_RES (15)..(15): D-amino acid
  C-term NH2
LTFAEFWAQAAAAIA

SEQ ID NO: 2000 - protein, 15 aa, Artificial Sequence
  Description of Artificial Sequence: Synthetic peptide
  N-term Dmaac
  MOD_RES (4)..(4): Alpha-Me R-azide 1,4 triazole (6 carbon) alanine olefin amino acid connected by an all-carbon crosslinker comprising one double bond
  misc_feature (4)..(11): Crosslink between residues
  MOD_RES (11)..(11): Alpha-Me alkyne 1,4 triazole (5 carbon) alanine olefin amino acid connected by an all-carbon crosslinker comprising one double bond
  MOD_RES (14)..(14): Norleucine
  C-term NH2
LTFAAYWAQLAAALA

SEQ ID NO: 2001 - protein, 15 aa, Artificial Sequence
  Description of Artificial Sequence: Synthetic peptide
  N-term Dmaac
  MOD_RES (4)..(4): Alpha-Me R-azide 1,4 triazole (6 carbon) alanine olefin amino acid connected by an all-carbon crosslinker comprising one double bond
  misc_feature (4)..(11): Crosslink between residues
  MOD_RES (11)..(11): Alpha-Me alkyne 1,4 triazole (5 carbon) alanine olefin amino acid connected by an all-carbon crosslinker comprising one double bond
  MOD_RES (14)..(14): Norleucine
  C-term NH2
LTFAAYWAQLAAALA

SEQ ID NO: 2002 - protein, 15 aa, Artificial Sequence
  Description of Artificial Sequence: Synthetic peptide
  N-term Ac
  MOD_RES (4)..(4): Alpha-Me R-azide 1,4 triazole (6 carbon) alanine olefin amino acid connected by an all-carbon crosslinker comprising one double bond
  misc_feature (4)..(11): Crosslink between residues
  MOD_RES (11)..(11): Alpha-Me alkyne 1,4 triazole (5 carbon) alanine olefin amino acid connected by an all-carbon crosslinker comprising one double bond
  MOD_RES (14)..(14): Norleucine
  C-term NH2
LTFAAYWAQLAAALA

SEQ ID NO: 2003 - protein, 17 aa, Artificial Sequence
  Description of Artificial Sequence: Synthetic peptide
  N-term Ac
  MOD_RES (4)..(4): Alpha-Me R-azide 1,4 triazole (6 carbon) alanine olefin amino acid connected by an all-carbon crosslinker comprising one double bond
  misc_feature (4)..(11): Crosslink between residues
  MOD_RES (11)..(11): Alpha-Me alkyne 1,4 triazole (5 carbon) alanine olefin amino acid connected by an all-carbon crosslinker comprising one double bond
  MOD_RES (17)..(17): D-amino acid
  C-term NH2
LTFAEYWAQLAAAAAAA

SEQ ID NO: 2004 - protein, 16 aa, Artificial Sequence
  Description of Artificial Sequence: Synthetic peptide
  MOD_RES (1)..(1): Cou6
  MOD_RES (2)..(2): Beta-Ala
  MOD_RES (6)..(6): Alpha-Me R-azide 1,4 triazole (6 carbon) alanine olefin amino acid connected by an all-carbon crosslinker comprising one double bond
  misc_feature (6)..(13): Crosslink between residues
  MOD_RES (12)..(12): homo-Leu
  MOD_RES (13)..(13): Alpha-Me alkyne 1,4 triazole (5 carbon) alanine olefin amino acid connected by an all-carbon crosslinker comprising one double bond
  C-term NH2
XALTFAEYWAQLASAA

SEQ ID NO: 2005 - protein, 16 aa, Artificial Sequence
  Description of Artificial Sequence: Synthetic peptide
  MOD_RES (1)..(1): Cou8
  MOD_RES (2)..(2): Beta-Ala
  MOD_RES (6)..(6): Alpha-Me R-azide 1,4 triazole (6 carbon) alanine olefin amino acid connected by an all-carbon crosslinker comprising one double bond
  misc_feature (6)..(13): Crosslink between residues
  MOD_RES (12)..(12): homo-Leu
  MOD_RES (13)..(13): Alpha-Me alkyne 1,4 triazole (5 carbon) alanine olefin amino acid connected by an all-carbon crosslinker comprising one double bond
  C-term NH2
XALTFAEYWAQLASAA

SEQ ID NO: 2006 - protein, 17 aa, Artificial Sequence
  Description of Artificial Sequence: Synthetic peptide
  N-term Ac
  MOD_RES (3)..(3): 4-iodo-Phe
  MOD_RES (4)..(4): Alpha-Me R-azide 1,4 triazole (6 carbon) alanine olefin amino acid connected by an all-carbon crosslinker comprising one double bond
  misc_feature (4)..(11): Crosslink between residues
  MOD_RES (11)..(11): Alpha-Me alkyne 1,4 triazole (5 carbon) alanine olefin amino acid connected by an all-carbon crosslinker comprising one double bond
  MOD_RES (17)..(17): D-amino acid
  C-term NH2
LTFAEYWAQLAAAAAAA

SEQ ID NO: 2007 - protein, 15 aa, Artificial Sequence
  Description of Artificial Sequence: Synthetic peptide
  N-term Ac
  MOD_RES (4)..(4): Alpha-Me R-azide 1,4 triazole (6 carbon) alanine olefin amino acid connected by an all-carbon crosslinker comprising one double bond
  misc_feature (4)..(11): Crosslink between residues
  MOD_RES (11)..(11): Alpha-Me alkyne 1,4 triazole (5 carbon) alanine olefin amino acid connected by an all-carbon crosslinker comprising one double bond
  MOD_RES (14)..(14): Norleucine
  C-term NH2
LTFAAYWAQLAAALA

SEQ ID NO: 2008 - protein, 17 aa, Artificial Sequence
  Description of Artificial Sequence: Synthetic peptide
  N-term Ac
  MOD_RES (4)..(4): Alpha-Me R-azide 1,4 triazole (6 carbon) alanine olefin amino acid connected by an all-carbon crosslinker comprising one double bond
  misc_feature (4)..(11): Crosslink between residues
  MOD_RES (11)..(11): Alpha-Me alkyne 1,4 triazole (5 carbon) alanine olefin amino acid connected by an all-carbon crosslinker comprising one double bond
  MOD_RES (17)..(17): D-amino acid
  C-term NH2
LTFAAYWAQLAAAAAAA

SEQ ID NO: 2009 - protein, 17 aa, Artificial Sequence
  Description of Artificial Sequence: Synthetic peptide
  N-term Ac
  MOD_RES (4)..(4): Alpha-Me R-azide 1,4 triazole (6 carbon) alanine olefin amino acid connected by an all-carbon crosslinker comprising one double bond
  misc_feature (4)..(11): Crosslink between residues
  MOD_RES (11)..(11): Alpha-Me alkyne 1,4 triazole (5 carbon) alanine olefin amino acid connected by an all-carbon crosslinker comprising one double bond
  MOD_RES (17)..(17): D-amino acid
  C-term NH2
LTFAEYWAQLAAAAAAA

SEQ ID NO: 2010 - protein, 17 aa, Artificial Sequence
  Description of Artificial Sequence: Synthetic peptide
  N-term Ac
  MOD_RES (4)..(4): Alpha-Me R-azide 1,5 triazole (6 carbon) alanine olefin amino acid connected by an all-carbon crosslinker comprising one double bond
  misc_feature (4)..(11): Crosslink between residues
  MOD_RES (11)..(11): Alpha-Me alkyne 1,5 triazole (5 carbon) alanine olefin amino acid connected by an all-carbon crosslinker comprising one double bond
  MOD_RES (17)..(17): D-amino acid
  C-term NH2
LTFAAYWAQLAAAAAAA

SEQ ID NO: 2011 - protein, 14 aa, Artificial Sequence
  Description of Artificial Sequence: Synthetic peptide
  N-term Ac
  MOD_RES (4)..(4): Alpha-Me R-azide 1,4 triazole (6 carbon) alanine olefin amino acid connected by an all-carbon crosslinker comprising one double bond
  misc_feature (4)..(11): Crosslink between residues
  MOD_RES (10)..(10): Cyclobutyl-Ala
  MOD_RES (11)..(11): Alpha-Me alkyne 1,4 triazole (5 carbon) alanine olefin amino acid connected by an all-carbon crosslinker comprising one double bond
  C-term NH2
LTFAEYWAQAASAA

SEQ ID NO: 2012 - protein, 14 aa, Artificial Sequence
  Description of Artificial Sequence: Synthetic peptide
  N-term Ac
  MOD_RES (4)..(4): Alpha-Me R-azide 1,4 triazole (4 carbon) alanine olefin amino acid connected by an all-carbon crosslinker comprising one double bond
  misc_feature (4)..(11): Crosslink between residues
  MOD_RES (10)..(10): Cyclobutyl-Ala
  MOD_RES (11)..(11): Alpha-Me alkyne 1,4 triazole (5 carbon) alanine olefin amino acid connected by an all-carbon crosslinker comprising one double bond
  C-term NH2
LTFAEYWAQAASAA

SEQ ID NO: 2013 - protein, 14 aa, Artificial Sequence
  Description of Artificial Sequence: Synthetic peptide
  N-term Ac
  MOD_RES (4)..(4): Alpha-Me R-azide 1,4 triazole (5 carbon) alanine olefin amino acid connected by an all-carbon crosslinker comprising one double bond
  misc_feature (4)..(11): Crosslink between residues
  MOD_RES (10)..(10): Cyclobutyl-Ala
  MOD_RES (11)..(11): Alpha-Me alkyne 1,4 triazole (5 carbon) alanine olefin amino acid connected by an all-carbon crosslinker comprising one double bond
  C-term NH2
LTFAEYWAQAASAA

SEQ ID NO: 2014 - protein, 14 aa, Artificial Sequence
  Description of Artificial Sequence: Synthetic peptide
  N-term Ac
  MOD_RES (4)..(4): Alpha-Me R-azide 1,5 triazole (6 carbon) alanine olefin amino acid connected by an all-carbon crosslinker comprising one double bond
  misc_feature (4)..(11): Crosslink between residues
  MOD_RES (10)..(10): Cyclobutyl-Ala
  MOD_RES (11)..(11): Alpha-Me alkyne 1,5 triazole (5 carbon) alanine olefin amino acid connected by an all-carbon crosslinker comprising one double bond
  C-term NH2
LTFAEYWAQAASAA

SEQ ID NO: 2015 - protein, 14 aa, Artificial Sequence
  Description of Artificial Sequence: Synthetic peptide
  N-term Ac
  MOD_RES (4)..(4): Alpha-Me R-azide 1,4 triazole (6 carbon) alanine olefin amino acid connected by an all-carbon crosslinker comprising one double bond
  misc_feature (4)..(11): Crosslink between residues
  MOD_RES (10)..(10): Cyclobutyl-Ala
  MOD_RES (11)..(11): 5I-Alpha-Me alkyne 1,4 triazole (5 carbon) alanine olefin amino acid connected by an all-carbon crosslinker comprising one double bond
  C-term NH2
LTFAEYWAQAASAA

SEQ ID NO: 2016 - protein, 14 aa, Artificial Sequence
  Description of Artificial Sequence: Synthetic peptide
  N-term Ac
  MOD_RES (4)..(4): Alpha-Me R-azide 1,5 triazole (6 carbon) alanine olefin amino acid connected by an all-carbon crosslinker comprising one double bond
  misc_feature (4)..(11): Crosslink between residues
  MOD_RES (10)..(10): Cyclobutyl-Ala
  MOD_RES (11)..(11): Alpha-Me alkyne 1,5 triazole (5 carbon) alanine olefin amino acid connected by an all-carbon crosslinker comprising one double bond
  C-term NH2
LTAAEYWAQAASAA

SEQ ID NO: 2017 - protein, 14 aa, Artificial Sequence
  Description of Artificial Sequence: Synthetic peptide
  N-term Ac
  MOD_RES (4)..(4): Alpha-Me R-azide 1,4 triazole (6 carbon) alanine olefin amino acid connected by an all-carbon crosslinker comprising one double bond
  misc_feature (4)..(11): Crosslink between residues
  MOD_RES (10)..(10): Cyclobutyl-Ala
  MOD_RES (11)..(11): Alpha-Me alkyne 1,4 triazole (5 carbon) alanine olefin amino acid connected by an all-carbon crosslinker comprising one double bond
  C-term NH2
LTAAEYWAQAASAA

SEQ ID NO: 2018 - protein, 15 aa, Artificial Sequence
  Description of Artificial Sequence: Synthetic peptide
  N-term 5-FAM
  MOD_RES (1)..(1): Beta-Ala
  MOD_RES (5)..(5): Alpha-Me R-azide 1,4 triazole (6 carbon) alanine olefin amino acid connected by an all-carbon crosslinker comprising one double bond
  misc_feature (5)..(12): Crosslink between residues
  MOD_RES (11)..(11): Cyclobutyl-Ala
  MOD_RES (12)..(12): Alpha-Me alkyne 1,4 triazole (5 carbon) alanine olefin amino acid connected by an all-carbon crosslinker comprising one double bond
  C-term NH2
ALTFAEYWAQAASAA

SEQ ID NO: 2019 - protein, 15 aa, Artificial Sequence
  Description of Artificial Sequence: Synthetic peptide
  N-term 5-FAM
  MOD_RES (1)..(1): Beta-Ala
  MOD_RES (5)..(5): Alpha-Me R-azide 1,4 triazole (6 carbon) alanine olefin amino acid connected by an all-carbon crosslinker comprising one double bond
  misc_feature (5)..(12): Crosslink between residues
  MOD_RES (11)..(11): Cyclobutyl-Ala
  MOD_RES (12)..(12): Alpha-Me alkyne 1,4 triazole (5 carbon) alanine olefin amino acid connected by an all-carbon crosslinker comprising one double bond
  C-term NH2
ALTAAEYWAQAASAA

SEQ ID NO: 2020 - protein, 15 aa, Artificial Sequence
  Description of Artificial Sequence: Synthetic peptide
  N-term 5-FAM
  MOD_RES (1)..(1): Beta-Ala
  MOD_RES (5)..(5): Alpha-Me R-azide 1,5 triazole (6 carbon) alanine olefin amino acid connected by an all-carbon crosslinker comprising one double bond
  misc_feature (5)..(12): Crosslink between residues
  MOD_RES (11)..(11): Cyclobutyl-Ala
  MOD_RES (12)..(12): Alpha-Me alkyne 1,5 triazole (5 carbon) alanine olefin amino acid connected by an all-carbon crosslinker comprising one double bond
  C-term NH2
ALTFAEYWAQAASAA

SEQ ID NO: 2021 - protein, 15 aa, Artificial Sequence
  Description of Artificial Sequence: Synthetic peptide
  N-term 5-FAM
  MOD_RES (1)..(1): Beta-Ala
  MOD_RES (5)..(5): Alpha-Me R-azide 1,5 triazole (6 carbon) alanine olefin amino acid connected by an all-carbon crosslinker comprising one double bond
  misc_feature (5)..(12): Crosslink between residues
  MOD_RES (11)..(11): Cyclobutyl-Ala
  MOD_RES (12)..(12): Alpha-Me alkyne 1,5 triazole (5 carbon) alanine olefin amino acid connected by an all-carbon crosslinker comprising one double bond
  C-term NH2
ALTAAEYWAQAASAA

SEQ ID NO: 2022 - protein, 14 aa, Artificial Sequence
  Description of Artificial Sequence: Synthetic peptide
  N-term Ac
  MOD_RES (4)..(4): Alpha-Me R-azide 1,4 triazole (6 carbon) alanine olefin amino acid connected by an all-carbon crosslinker comprising one double bond
  misc_feature (4)..(11): Crosslink between residues
  MOD_RES (10)..(10): Cyclobutyl-Ala
  MOD_RES (11)..(11): 5Ph-alpha-Me alkyne 1,4 triazole (5 carbon) alanine olefin amino acid connected by an all-carbon crosslinker comprising one double bond
  C-term NH2
LTFAEYWAQAASAA

SEQ ID NO: 2023 - protein, 14 aa, Artificial Sequence
  Description of Artificial Sequence: Synthetic peptide
  N-term Ac
  MOD_RES (4)..(4): Alpha-Me R-azide 1,4 triazole (6 carbon) alanine olefin amino acid connected by an all-carbon crosslinker comprising one double bond
  misc_feature (4)..(11): Crosslink between residues
  MOD_RES (10)..(10): Cyclobutyl-Ala
  MOD_RES (11)..(11): 5Prp-alpha-Me alkyne 1,4 triazole (5 carbon) alanine olefin amino acid connected by an all-carbon crosslinker comprising one double bond
  C-term NH2
LTFAEYWAQAASAA

SEQ ID NO: 2024 - protein, 17 aa, Artificial Sequence
  Description of Artificial Sequence: Synthetic peptide
  N-term Ac
  MOD_RES (4)..(4): Alpha-Me R-azide 1,4 triazole (6 carbon) alanine olefin amino acid connected by an all-carbon crosslinker comprising one double bond
  misc_feature (4)..(11): Crosslink between residues
  MOD_RES (11)..(11): Alpha-Me alkyne 1,4 triazole (5 carbon) alanine olefin amino acid connected by an all-carbon crosslinker comprising one double bond
  MOD_RES (17)..(17): D-amino acid
  C-term NH2
LTFAAYWAALAAAAAAA

SEQ ID NO: 2025 - protein, 14 aa, Artificial Sequence
  Description of Artificial Sequence: Synthetic peptide
  N-term Ac
  MOD_RES (4)..(4): Alpha-Me R-azide 1,4 triazole (6 carbon) alanine olefin amino acid connected by an all-carbon crosslinker comprising one double bond
  misc_feature (4)..(11): Crosslink between residues
  MOD_RES (10)..(10): Cyclobutyl-Ala
  MOD_RES (11)..(11): 5penNH2-alpha-Me alkyne 1,4 triazole (5 carbon) alanine olefin amino acid connected by an all-carbon crosslinker comprising one double bond
  C-term NH2
LTFAEYWAQAASAA

SEQ ID NO: 2026 - protein, 14 aa, Artificial Sequence
  Description of Artificial Sequence: Synthetic peptide
  N-term Ac
  MOD_RES (4)..(4): Alpha-Me R-azide 1,4 triazole (6 carbon) alanine olefin amino acid connected by an all-carbon crosslinker comprising one double bond
  misc_feature (4)..(11): Crosslink between residues
  MOD_RES (10)..(10): Cyclobutyl-Ala
  MOD_RES (11)..(11): 5BnzNH2-alpha-Me alkyne 1,4 triazole (5 carbon) alanine olefin amino acid connected by an all-carbon crosslinker comprising one double bond
  C-term NH2
LTFAEYWAQAASAA

SEQ ID NO: 2027 - protein, 14 aa, Artificial Sequence
  Description of Artificial Sequence: Synthetic peptide
  N-term Ac
  MOD_RES (4)..(4): Alpha-Me R-azide 1,4 triazole (6 carbon) alanine olefin amino acid connected by an all-carbon crosslinker comprising one double bond
  misc_feature (4)..(11): Crosslink between residues
  MOD_RES (10)..(10): Cyclobutyl-Ala
  MOD_RES (11)..(11): 5prpOMe-alpha-Me alkyne 1,4 triazole (5 carbon) alanine olefin amino acid connected by an all-carbon crosslinker comprising one double bond
  C-term NH2
LTFAEYWAQAASAA

SEQ ID NO: 2028 - protein, 17 aa, Artificial Sequence
  Description of Artificial Sequence: Synthetic peptide
  N-term Ac
  MOD_RES (4)..(4): Alpha-Me R-azide 1,5 triazole (6 carbon) alanine olefin amino acid connected by an all-carbon crosslinker comprising one double bond
  misc_feature (4)..(11): Crosslink between residues
  MOD_RES (11)..(11): 4Me-alpha-Me alkyne 1,5 triazole (5 carbon) alanine olefin amino acid connected by an all-carbon crosslinker comprising one double bond
  MOD_RES (17)..(17): D-amino acid
  C-term NH2
LTFAEYWAQLAAAAAAA

SEQ ID NO: 2029 - protein, 17 aa, Artificial Sequence
  Description of Artificial Sequence: Synthetic peptide
  N-term Ac
  MOD_RES (4)..(4): Alpha-Me R-azide 1,5 triazole (6 carbon) alanine olefin amino acid connected by an all-carbon crosslinker comprising one double bond
  misc_feature (4)..(11): Crosslink between residues
  MOD_RES (11)..(11): 4Ph-alpha-Me alkyne 1,5 triazole (5 carbon) alanine olefin amino acid connected by an all-carbon crosslinker comprising one double bond
  MOD_RES (17)..(17): D-amino acid
  C-term NH2
LTFAEYWAQLAAAAAAA

SEQ ID NO: 2030 - protein, 14 aa, Artificial Sequence
  Description of Artificial Sequence: Synthetic peptide
  N-term Ac
  MOD_RES (4)..(4): Alpha-Me R-azide 1,5 triazole (6 carbon) alanine olefin amino acid connected by an all-carbon crosslinker comprising one double bond
  misc_feature (4)..(11): Crosslink between residues
  MOD_RES (10)..(10): Cyclobutyl-Ala
  MOD_RES (11)..(11): 4Me-alpha-Me alkyne 1,5 triazole (5 carbon) alanine olefin amino acid connected by an all-carbon crosslinker comprising one double bond
  C-term NH2
LTFAEYWAQAASAA

SEQ ID NO: 2031 - protein, 14 aa, Artificial Sequence
  Description of Artificial Sequence: Synthetic peptide
  N-term Ac
  MOD_RES (4)..(4): Alpha-Me R-azide 1,5 triazole (6 carbon) alanine olefin amino acid connected by an all-carbon crosslinker comprising one double bond
  misc_feature (4)..(11): Crosslink between residues
  MOD_RES (10)..(10): Cyclobutyl-Ala
  MOD_RES (11)..(11): 4Ph-alpha-Me alkyne 1,5 triazole (5 carbon) alanine olefin amino acid connected by an all-carbon crosslinker comprising one double bond
  C-term NH2
LTFAEYWAQAASAA

SEQ ID NO: 2032 - protein, 14 aa, Artificial Sequence
  Description of Artificial Sequence: Synthetic peptide
  N-term Ac
  MOD_RES (4)..(4): Any amino acid available for crosslinking
  misc_feature (4)..(11): Crosslink between residues
  MOD_RES (10)..(10): Cyclobutyl-Ala
  MOD_RES (11)..(11): Any amino acid available for crosslinking
  C-term NH2
LTFXEYWAQAXSAA

SEQ ID NO: 2033 - protein, 15 aa, Artificial Sequence
  Description of Artificial Sequence: Synthetic peptide
  N-term Ac
  MOD_RES (4)..(4): Alpha-Me R-azide 1,4 triazole (6 carbon) alanine olefin amino acid connected by an all-carbon crosslinker comprising one double bond
  misc_feature (4)..(11): Crosslink between residues
  MOD_RES (11)..(11): Alpha-Me alkyne 1,4 triazole (5 carbon) alanine olefin amino acid connected by an all-carbon crosslinker comprising one double bond
  MOD_RES (14)..(14): Norleucine
  C-term NH2
LTFAAYWAQLAAALA

SEQ ID NO: 2034 - protein, 15 aa, Artificial Sequence
  Description of Artificial Sequence: Synthetic peptide
  N-term Ac
  MOD_RES (4)..(4): Alpha-Me R-azide 1,4 triazole (6 carbon) alanine olefin amino acid connected by an all-carbon crosslinker comprising one double bond
  misc_feature (4)..(11): Crosslink between residues
  MOD_RES (11)..(11): Alpha-Me alkyne 1,4 triazole (5 carbon) alanine olefin amino acid connected by an all-carbon crosslinker comprising one double bond
  C-term NH2
LTFAAYWAQLAAAIA

SEQ ID NO: 2035 - protein, 14 aa, Artificial Sequence
  Description of Artificial Sequence: Synthetic peptide
  N-term Ac
  MOD_RES (4)..(4): Alpha-Me R-azide 1,4 triazole (6 carbon) alanine olefin amino acid connected by an all-carbon crosslinker comprising one double bond
  misc_feature (4)..(11): Crosslink between residues
  MOD_RES (10)..(10): Cyclobutyl-Ala
  MOD_RES (11)..(11): Alpha-Me alkyne 1,4 triazole (5 carbon) alanine olefin amino acid connected by an all-carbon crosslinker comprising one double bond
  C-term NH2
LTFAEYWAQAASAA

SEQ ID NO: 2036 - protein, 14 aa, Artificial Sequence
  Description of Artificial Sequence: Synthetic peptide
  N-term Ac
  MOD_RES (4)..(4): Alpha-Me R-azide 1,4 triazole (6 carbon) alanine olefin amino acid connected by an all-carbon crosslinker comprising one double bond
  misc_feature (4)..(11): Crosslink between residues
  MOD_RES (7)..(7): 6cl-Trp
  MOD_RES (11)..(11): Alpha-Me alkyne 1,4 triazole (5 carbon) alanine olefin amino acid connected by an all-carbon crosslinker comprising one double bond
  C-term NH2
LTFAAYWAQLASAA

SEQ ID NO: 2037 - protein, 14 aa, Artificial Sequence
  Description of Artificial Sequence: Synthetic peptide
  N-term Ac
  MOD_RES (4)..(4): Alpha-Me R-azide 1,5 triazole (6 carbon) alanine olefin amino acid connected by an all-carbon crosslinker comprising one double bond
  misc_feature (4)..(11): Crosslink between residues
  MOD_RES (10)..(10): Cyclobutyl-Ala
  MOD_RES (11)..(11): Alpha-Me alkyne 1,5 triazole (5 carbon) alanine olefin amino acid connected by an all-carbon crosslinker comprising one double bond
  C-term NH2
LTFAEYWAQAASAA

SEQ ID NO: 2038 - protein, 14 aa, Artificial Sequence
  Description of Artificial Sequence: Synthetic peptide
  N-term Ac
  MOD_RES (4)..(4): Alpha-Me R-azide 1,4 triazole (6 carbon) alanine olefin amino acid connected by an all-carbon crosslinker comprising one double bond
  misc_feature (4)..(11): Crosslink between residues
  MOD_RES (10)..(10): Cyclobutyl-Ala
  MOD_RES (11)..(11): 5prpOMe-alpha-Me alkyne 1,4 triazole (5 carbon) alanine olefin amino acid connected by an all-carbon crosslinker comprising one double bond
  C-term NH2
LTFAEYWAQAASAA

SEQ ID NO: 2039 - protein, 16 aa, Artificial Sequence
  Description of Artificial Sequence: Synthetic peptide
  N-term Ac
  MOD_RES (7)..(7): Alpha-Me R-azide 1,5 triazole (6 carbon) alanine olefin amino acid connected by an all-carbon crosslinker comprising one double bond
  misc_feature (7)..(14): Crosslink between residues
  MOD_RES (14)..(14): Alpha-Me alkyne 1,5 triazole (5 carbon) alanine olefin amino acid connected by an all-carbon crosslinker comprising one double bond
  C-term NH2
QSQQTFANLWRLLAQN

SEQ ID NO: 2040 - protein, 16 aa, Artificial Sequence
  Description of Artificial Sequence: Synthetic peptide
  N-term Ac
  MOD_RES (7)..(7): Alpha-Me R-azide 1,4 triazole (5 carbon) alanine olefin amino acid connected by an all-carbon crosslinker comprising one double bond
  misc_feature (7)..(14): Crosslink between residues
  MOD_RES (14)..(14): Alpha-Me alkyne 1,4 triazole (5 carbon) alanine olefin amino acid connected by an all-carbon crosslinker comprising one double bond
  C-term NH2
QSQQTFANLWRLLAQN

SEQ ID NO: 2041 - protein, 16 aa, Artificial Sequence
  Description of Artificial Sequence: Synthetic peptide
  N-term Ac
  MOD_RES (7)..(7): Alpha-H R-azide 1,5 triazole (6 carbon) alanine olefin amino acid connected by an all-carbon crosslinker comprising one double bond
  misc_feature (7)..(14): Crosslink between residues
  MOD_RES (14)..(14): Alpha-H alkyne 1,5 triazole (5 carbon) alanine olefin amino acid connected by an all-carbon crosslinker comprising one double bond
  C-term NH2
QSQQTFANLWRLLAQN

SEQ ID NO: 2042 - protein, 16 aa, Artificial Sequence
  Description of Artificial Sequence: Synthetic peptide
  N-term Ac
  MOD_RES (7)..(7): Alpha-H R-azide 1,4 triazole (5 carbon) alanine olefin amino acid connected by an all-carbon crosslinker comprising one double bond
  misc_feature (7)..(14): Crosslink between residues
  MOD_RES (14)..(14): Alpha-H alkyne 1,4 triazole (5 carbon) alanine olefin amino acid connected by an all-carbon crosslinker comprising one double bond
  C-term NH2
QSQQTFANLWRLLAQN

SEQ ID NO: 2043 - protein, 16 aa, Artificial Sequence
  Description of Artificial Sequence: Synthetic peptide
  N-term Ac
  MOD_RES (7)..(7): Alpha-Me R-azide 1,5 triazole (5 carbon) alanine olefin amino acid connected by an all-carbon crosslinker comprising one double bond
  misc_feature (7)..(14): Crosslink between residues
  MOD_RES (14)..(14): Alpha-Me alkyne 1,5 triazole (5 carbon) alanine olefin amino acid connected by an all-carbon crosslinker comprising one double bond
  C-term NH2
QSQQTFANLWRLLAQN

SEQ ID NO: 2044 - protein, 16 aa, Artificial Sequence
  Description of Artificial Sequence: Synthetic peptide
  N-term Ac
  MOD_RES (7)..(7): Alpha-Me R-alkyne 1,5 triazole (5 carbon) alanine olefin amino acid connected by an all-carbon crosslinker comprising one double bond
  misc_feature (7)..(14): Crosslink between residues
  MOD_RES (14)..(14): Alpha-Me azide 1,5 triazole (5 carbon) alanine olefin amino acid connected by an all-carbon crosslinker comprising one double bond
  C-term NH2
QSQQTFANLWRLLAQN

SEQ ID NO: 2045 - protein, 16 aa, Artificial Sequence
  Description of Artificial Sequence: Synthetic peptide
  N-term Ac
  MOD_RES (7)..(7): Alpha-Me R-alkyne 1,5 triazole (5 carbon) alanine olefin amino acid connected by an all-carbon crosslinker comprising one double bond
  misc_feature (7)..(14): Crosslink between residues
  MOD_RES (14)..(14): Alpha-Me azide 1,5 triazole (6 carbon) alanine olefin amino acid connected by an all-carbon crosslinker comprising one double bond
  C-term NH2
QSQQTFANLWRLLAQN

SEQ ID NO: 2046 - protein, 16 aa, Artificial Sequence
  Description of Artificial Sequence: Synthetic peptide
  N-term Ac
  MOD_RES (7)..(7): Alpha-Me R-alkyne 1,4 triazole (5 carbon) alanine olefin amino acid connected by an all-carbon crosslinker comprising one double bond
  misc_feature (7)..(14): Crosslink between residues
  MOD_RES (14)..(14): Alpha-Me azide 1,4 triazole (5 carbon) alanine olefin amino acid connected by an all-carbon crosslinker comprising one double bond
  C-term NH2
QSQQTFANLWRLLAQN

SEQ ID NO: 2047 - protein, 16 aa, Artificial Sequence
  Description of Artificial Sequence: Synthetic peptide
  N-term Ac
  MOD_RES (7)..(7): Alpha-Me R-alkyne 1,4 triazole (5 carbon) alanine olefin amino acid connected by an all-carbon crosslinker comprising one double bond
  misc_feature (7)..(14): Crosslink between residues
  MOD_RES (14)..(14): Alpha-Me azide 1,4 triazole (6 carbon) alanine olefin amino acid connected by an all-carbon crosslinker comprising one double bond
  C-term NH2
QSQQTFANLWRLLAQN

SEQ ID NO: 2048 - protein, 16 aa, Artificial Sequence
  Description of Artificial Sequence: Synthetic peptide
  N-term Ac
  MOD_RES (7)..(7): Alpha-Me R-azide 1,4 triazole (6 carbon) alanine olefin amino acid connected by an all-carbon crosslinker comprising one double bond
  misc_feature (7)..(14): Crosslink between residues
  MOD_RES (14)..(14): Alpha-Me alkyne 1,4 triazole (5 carbon) alanine olefin amino acid connected by an all-carbon crosslinker comprising one double bond
  C-term NH2
QSQQTFANLWRLLAQN

SEQ ID NO: 2049 - protein, 16 aa, Artificial Sequence
  Description of Artificial Sequence: Synthetic peptide
  N-term Ac
  MOD_RES (7)..(7): Alpha-Me R-azide 1,5 triazole (6 carbon) alanine olefin amino acid connected by an all-carbon crosslinker comprising one double bond
  misc_feature (7)..(14): Crosslink between residues
  MOD_RES (14)..(14): Alpha-Me alkyne 1,5 triazole (6 carbon) alanine olefin amino acid connected by an all-carbon crosslinker comprising one double bond
  C-term NH2
QSQQTFANLWRLLAQN

SEQ ID NO: 2050 - protein, 16 aa, Artificial Sequence
  Description of Artificial Sequence: Synthetic peptide
  N-term Ac
  MOD_RES (7)..(7): Alpha-Me R-alkyne 1,5 triazole (6 carbon) alanine olefin amino acid connected by an all-carbon crosslinker comprising one double bond
  misc_feature (7)..(14): Crosslink between residues
  MOD_RES (14)..(14): Alpha-Me azide 1,5 triazole (6 carbon) alanine olefin amino acid connected by an all-carbon crosslinker comprising one double bond
  C-term NH2
QSQQTFANLWRLLAQN

SEQ ID NO: 2051 - protein, 16 aa, Artificial Sequence
  Description of Artificial Sequence: Synthetic peptide
  N-term Ac
  MOD_RES (7)..(7): Alpha-Me R-azide 1,4 triazole (6 carbon) alanine olefin amino acid connected by an all-carbon crosslinker comprising one double bond
  misc_feature (7)..(14): Crosslink between residues
  MOD_RES (14)..(14): Alpha-Me alkyne 1,4 triazole (6 carbon) alanine olefin amino acid connected by an all-carbon crosslinker comprising one double bond
  C-term NH2
QSQQTFANLWRLLAQN

SEQ ID NO: 2052 - protein, 16 aa, Artificial Sequence
  Description of Artificial Sequence: Synthetic peptide
  N-term Ac
  MOD_RES (7)..(7): Alpha-Me R-alkyne 1,4 triazole (6 carbon) alanine olefin amino acid connected by an all-carbon crosslinker comprising one double bond
  misc_feature (7)..(14): Crosslink between residues
  MOD_RES (14)..(14): Alpha-Me azide 1,4 triazole (6 carbon) alanine olefin amino acid connected by an all-carbon crosslinker comprising one double bond
  C-term NH2
QSQQTFANLWRLLAQN

SEQ ID NO: 2053 - protein, 16 aa, Artificial Sequence
  Description of Artificial Sequence: Synthetic peptide
  N-term Ac
  MOD_RES (7)..(7): Alpha-Me R-azide 1,4 triazole (5 carbon) alanine olefin amino acid connected by an all-carbon crosslinker comprising one double bond
  misc_feature (7)..(14): Crosslink between residues
  MOD_RES (14)..(14): Alpha-Me alkyne 1,4 triazole (6 carbon) alanine olefin amino acid connected by an all-carbon crosslinker comprising one double bond
  C-term NH2
QSQQTFANLWRLLAQN

SEQ ID NO: 2054 - protein, 16 aa, Artificial Sequence
  Description of Artificial Sequence: Synthetic peptide
  N-term Ac
  MOD_RES (7)..(7): 4Me-Alpha-Me R-azide 1,5 triazole (6 carbon) alanine olefin amino acid connected by an all-carbon crosslinker comprising one double bond
  misc_feature (7)..(14): Crosslink between residues
  MOD_RES (14)..(14): 4Me-alpha-Me alkyne 1,5 triazole (5 carbon) alanine olefin amino acid connected by an all-carbon crosslinker comprising one double bond
  C-term NH2
QSQQTFANLWRLLAQN

SEQ ID NO: 2055 - protein, 12 aa, Artificial Sequence
  Description of Artificial Sequence: Synthetic peptide
  N-term Ac
  MOD_RES (4)..(4): Alpha-Me R-alkyne 1,4 triazole (5 carbon) alanine olefin amino acid connected by an all-carbon crosslinker comprising one double bond
  misc_feature (4)..(11): Crosslink between residues
  MOD_RES (11)..(11): Alpha-Me azide 1,4 triazole (6 carbon) alanine olefin amino acid connected by an all-carbon crosslinker comprising one double bond
  C-term NH2
LTFAHYWAQLAS

SEQ ID NO: 2056 - protein, 10 aa, Artificial Sequence
  Description of Artificial Sequence: Synthetic peptide
  N-term H
  MOD_RES (2)..(2): Alpha-Me R-azide 1,4 triazole (6 carbon) alanine olefin amino acid connected by an all-carbon crosslinker comprising one double bond
  misc_feature (2)..(9): Crosslink between residues
  MOD_RES (9)..(9): Alpha-Me alkyne 1,4 triazole (5 carbon) alanine olefin amino acid connected by an all-carbon crosslinker comprising one double bond
  C-term NH2
FAHYWAQLAS

SEQ ID NO: 2057 - protein, 12 aa, Artificial Sequence
  Description of Artificial Sequence: Synthetic peptide
  N-term Ac
  MOD_RES (4)..(4): Alpha-Me R-azide 1,4 triazole (6 carbon) alanine olefin amino acid connected by an all-carbon crosslinker comprising one double bond
  misc_feature (4)..(11): Crosslink between residues
  MOD_RES (11)..(11): Alpha-Me alkyne 1,4 triazole (5 carbon) alanine olefin amino acid connected by an all-carbon crosslinker comprising one double bond
  C-term NH2
LTFAHYWAQLAS

SEQ ID NO: 2058 - protein, 10 aa, Artificial Sequence
  Description of Artificial Sequence: Synthetic peptide
  N-term Ac
  MOD_RES (2)..(2): Alpha-Me R-azide 1,4 triazole (6 carbon) alanine olefin amino acid connected by an all-carbon crosslinker comprising one double bond
  misc_feature (2)..(9): Crosslink between residues
  MOD_RES (9)..(9): Alpha-Me alkyne 1,4 triazole (5 carbon) alanine olefin amino acid connected by an all-carbon crosslinker comprising one double bond
  C-term NH2
FAHYWAQLAS

SEQ ID NO: 2059 - protein, 12 aa, Artificial Sequence
  Description of Artificial Sequence: Synthetic peptide
  N-term Ac
  MOD_RES (4)..(4): Alpha-Me R-azide 1,4 triazole (6 carbon) alanine olefin amino acid connected by an all-carbon crosslinker comprising one double bond
  misc_feature (4)..(11): Crosslink between residues
  MOD_RES (11)..(11): Alpha-Me alkyne 1,4 triazole (6 carbon) alanine olefin amino acid connected by an all-carbon crosslinker comprising one double bond
  C-term NH2
LTFAHYWAQLAS

SEQ ID NO: 2060 - protein, 12 aa, Artificial Sequence
  Description of Artificial Sequence: Synthetic peptide
  N-term Ac
  MOD_RES (4)..(4): Alpha-Me R-alkyne 1,5 triazole (5 carbon) alanine olefin amino acid connected by an all-carbon crosslinker comprising one double bond
  misc_feature (4)..(11): Crosslink between residues
  MOD_RES (11)..(11): Alpha-Me azide 1,5 triazole (6 carbon) alanine olefin amino acid connected by an all-carbon crosslinker comprising one double bond
  C-term NH2
LTFAHYWAQLAS

SEQ ID NO: 2061 - protein, 12 aa, Artificial Sequence
  Description of Artificial Sequence: Synthetic peptide
  N-term Ac
  MOD_RES (4)..(4): Alpha-Me R-azide 1,4 triazole (6 carbon) alanine olefin amino acid connected by an all-carbon crosslinker comprising one double bond
  misc_feature (4)..(11): Crosslink between residues
  MOD_RES (11)..(11): Alpha-Me alkyne 1,4 triazole (5 carbon) alanine olefin amino acid connected by an all-carbon crosslinker comprising one double bond
  C-term NH2
LTFAAYWAQLAA

SEQ ID NO: 2062 - protein, 12 aa, Artificial Sequence
  Description of Artificial Sequence: Synthetic peptide
  N-term Ac
  MOD_RES (4)..(4): Alpha-Me R-alkyne 1,5 triazole (5 carbon) alanine olefin amino acid connected by an all-carbon crosslinker comprising one double bond
  misc_feature (4)..(11): Crosslink between residues
  MOD_RES (11)..(11): Alpha-Me azide 1,5 triazole (6 carbon) alanine olefin amino acid connected by an all-carbon crosslinker comprising one double bond
  C-term NH2
LTFAHYWAQLAS

SEQ ID NO: 2063 - protein, 12 aa, Artificial Sequence
  Description of Artificial Sequence: Synthetic peptide
  N-term Ac
  MOD_RES (4)..(4): Alpha-Me R-azide 1,4 triazole (6 carbon) alanine olefin amino acid connected by an all-carbon crosslinker comprising one double bond
  misc_feature (4)..(11): Crosslink between residues
  MOD_RES (11)..(11): Alpha-Me alkyne 1,4 triazole (5 carbon) alanine olefin amino acid connected by an all-carbon crosslinker comprising one double bond
  C-term NH2
LTFAAYWAQLAA

SEQ ID NO: 2064 - protein, 12 aa, Artificial Sequence
  Description of Artificial Sequence: Synthetic peptide
  N-term Ac
  C-term NH2
LTFEHYWAQLTS

SEQ ID NO: 2065 - protein, 12 aa, Artificial Sequence
  Description of Artificial Sequence: Synthetic peptide
  N-term Ac
  MOD_RES (2)..(2): Alpha-methyl-D-cysteine connected by an i to i+7, seven-methylene crosslinker to another thiol-containing amino acid
  misc_feature (2)..(9): Crosslink between residues
  MOD_RES (7)..(7): Ac3c
  MOD_RES (9)..(9): Alpha-methyl-L-cysteine connected by an i to i+7, seven-methylene crosslinker to another thiol-containing amino acid
  C-term NH2
FCAYWEXLCAAA

SEQ ID NO: 2066 - protein, 12 aa, Artificial Sequence
  Description of Artificial Sequence: Synthetic peptide
  N-term Ac
  MOD_RES (2)..(2): Alpha-methyl-D-cysteine connected by an i to i+7, seven-methylene crosslinker to another thiol-containing amino acid
  misc_feature (2)..(9): Crosslink between residues
  MOD_RES (7)..(7): Ac3c
  MOD_RES (9)..(9): Alpha-methyl-L-cysteine connected by an i to i+7, seven-methylene crosslinker to another thiol-containing amino acid
  MOD_RES (11)..(11): 2-aminoisobutyric acid
  C-term NH2
FCAYWEXLCAXA

SEQ ID NO: 2067 - protein, 14 aa, Artificial Sequence
  Description of Artificial Sequence: Synthetic peptide
  N-term Ac
  MOD_RES (4)..(4): Alpha-methyl-D-cysteine connected by an i to i+7, seven-methylene crosslinker to another thiol-containing amino acid
  misc_feature (4)..(11): Crosslink between residues
  MOD_RES (11)..(11): Alpha-methyl-L-cysteine connected by an i to i+7, seven-methylene crosslinker to another thiol-containing amino acid
  MOD_RES (14)..(14): Norleucine
  C-term NH2
LTFCAYWAQLCSAL

SEQ ID NO: 2068 - protein, 14 aa, Artificial Sequence
  Description of Artificial Sequence: Synthetic peptide
  N-term Ac
  MOD_RES (4)..(4): Alpha-methyl-D-cysteine connected by an i to i+7, seven-methylene crosslinker to another thiol-containing amino acid
  misc_feature (4)..(11): Crosslink between residues
  MOD_RES (11)..(11): Alpha-methyl-L-cysteine connected by an i to i+7, seven-methylene crosslinker to another thiol-containing amino acid
  C-term NH2
LTFCAYWAQLCSAL

SEQ ID NO: 2069 - protein, 14 aa, Artificial Sequence
  Description of Artificial Sequence: Synthetic peptide
  N-term Ac
  MOD_RES (4)..(4): Alpha-methyl-D-cysteine connected by an i to i+7, seven-methylene crosslinker to another thiol-containing amino acid
  misc_feature (4)..(11): Crosslink between residues
  MOD_RES (11)..(11): Alpha-methyl-L-cysteine connected by an i to i+7, seven-methylene crosslinker to another thiol-containing amino acid
  C-term NH2
LTFCAYWAQLCSAM

SEQ ID NO: 2070 - protein, 14 aa, Artificial Sequence
  Description of Artificial Sequence: Synthetic peptide
  N-term Ac
  MOD_RES (4)..(4): Alpha-methyl-D-cysteine connected by an i to i+7, seven-methylene crosslinker to another thiol-containing amino acid
  misc_feature (4)..(11): Crosslink between residues
  MOD_RES (11)..(11): Alpha-methyl-L-cysteine connected by an i to i+7, seven-methylene crosslinker to another thiol-containing amino acid
  MOD_RES (14)..(14): homo-Leu
  C-term NH2
LTFCAYWAQLCSAL

SEQ ID NO: 2071 - protein, 14 aa, Artificial Sequence
  Description of Artificial Sequence: Synthetic peptide
  N-term Ac
  MOD_RES (4)..(4): Alpha-methyl-D-cysteine connected by an i to i+7, seven-methylene crosslinker to another thiol-containing amino acid
  misc_feature (4)..(11): Crosslink between residues
  MOD_RES (11)..(11): Alpha-methyl-L-cysteine connected by an i to i+7, seven-methylene crosslinker to another thiol-containing amino acid
  C-term NH2
LTFCAYWAQLCSAF

SEQ ID NO: 2072 - protein, 14 aa, Artificial Sequence
  Description of Artificial Sequence: Synthetic peptide
  N-term Ac
  MOD_RES (4)..(4): Alpha-methyl-D-cysteine connected by an i to i+7, seven-methylene crosslinker to another thiol-containing amino acid
  misc_feature (4)..(11): Crosslink between residues
  MOD_RES (11)..(11): Alpha-methyl-L-cysteine connected by an i to i+7, seven-methylene crosslinker to another thiol-containing amino acid
  C-term NH2
LTFCAYWAQLCSAI

SEQ ID NO: 2073 - protein, 14 aa, Artificial Sequence
  Description of Artificial Sequence: Synthetic peptide
  N-term Ac
  MOD_RES (4)..(4): Alpha-methyl-D-cysteine connected by an i to i+7, seven-methylene crosslinker to another thiol-containing amino acid
  misc_feature (4)..(11): Crosslink between residues
  MOD_RES (11)..(11): Alpha-methyl-L-cysteine connected by an i to i+7, seven-methylene crosslinker to another thiol-containing amino acid
  MOD_RES (14)..(14): Cyclohexyl-Gly
  C-term NH2
LTFCAYWAQLCSAG

SEQ ID NO: 2074 - protein, 14 aa, Artificial Sequence
  Description of Artificial Sequence: Synthetic peptide
  N-term Ac
  MOD_RES (4)..(4): Alpha-methyl-D-cysteine connected by an i to i+7, seven-methylene crosslinker to another thiol-containing amino acid
  misc_feature (4)..(11): Crosslink between residues
  MOD_RES (11)..(11): Alpha-methyl-L-cysteine connected by an i to i+7, seven-methylene crosslinker to another thiol-containing amino acid
  MOD_RES (14)..(14): 2-aminoisobutyric acid
  C-term NH2
LTFCAYWAQLCSAX

SEQ ID NO: 2075 - protein, 14 aa, Artificial Sequence
  Description of Artificial Sequence: Synthetic peptide
  N-term Ac
  MOD_RES (4)..(4): Alpha-methyl-D-cysteine connected by an i to i+7, seven-methylene crosslinker to another thiol-containing amino acid
  misc_feature (4)..(11): Crosslink between residues
  MOD_RES (11)..(11): Alpha-methyl-L-cysteine connected by an i to i+7, seven-methylene crosslinker to another thiol-containing amino acid
  C-term NH2
LTFCAYWAQLCSAA

SEQ ID NO: 2076 - protein, 14 aa, Artificial Sequence
  Description of Artificial Sequence: Synthetic peptide
  N-term Ac
  MOD_RES (4)..(4): Alpha-methyl-D-cysteine connected by an i to i+7, seven-methylene crosslinker to another thiol-containing amino acid
  misc_feature (4)..(9): Crosslink between residues
  MOD_RES (9)..(9): Alpha-methyl-L-cysteine connected by an i to i+7, seven-methylene crosslinker to another thiol-containing amino acid
  MOD_RES (11)..(11): Alpha-methyl-L-cysteine connected by an i to i+7, seven-methylene crosslinker to another thiol-containing amino acid
  misc_feature (11)..(13): Crosslink between residues
  MOD_RES (13)..(13): Alpha-methyl-L-cysteine connected by an i to i+7, seven-methylene crosslinker to another thiol-containing amino acid
  MOD_RES (14)..(14): Norleucine
  C-term NH2
LTFCAYWACLCSCL

SEQ ID NO: 2077 - protein, 14 aa, Artificial Sequence
  Description of Artificial Sequence: Synthetic peptide
  N-term Ac
  MOD_RES (4)..(4): Alpha-methyl-D-cysteine connected by an i to i+7, seven-methylene crosslinker to another thiol-containing amino acid
  misc_feature (4)..(9): Crosslink between residues
  MOD_RES (9)..(9): Alpha-methyl-L-cysteine connected by an i to i+7, seven-methylene crosslinker to another thiol-containing amino acid
  MOD_RES (11)..(11): Alpha-methyl-L-cysteine connected by an i to i+7, seven-methylene crosslinker to another thiol-containing amino acid
  misc_feature (11)..(13): Crosslink between residues
  MOD_RES (13)..(13): Alpha-methyl-L-cysteine connected by an i to i+7, seven-methylene crosslinker to another thiol-containing amino acid
  C-term NH2
LTFCAYWACLCSCA

SEQ ID NO: 2078 - protein, 12 aa, Artificial Sequence
  Description of Artificial Sequence: Synthetic peptide
  N-term Ac
  MOD_RES (2)..(2): Alpha-methyl-D-cysteine connected by an i to i+7, seven-methylene crosslinker to another thiol-containing amino acid
  misc_feature (2)..(9): Crosslink between residues
  MOD_RES (7)..(7): Ac3c
  MOD_RES (9)..(9): Alpha-methyl-L-cysteine connected by an i to i+7, seven-methylene crosslinker to another thiol-containing amino acid
  MOD_RES (12)..(12): Norleucine
  C-term NH2
FCAYWEXLCAAL

SEQ ID NO: 2079 - protein, 12 aa, Artificial Sequence
  Description of Artificial Sequence: Synthetic peptide
  N-term Ac
  MOD_RES (2)..(2): Alpha-methyl-D-cysteine connected by an i to i+7, seven-methylene crosslinker to another thiol-containing amino acid
  misc_feature (2)..(9): Crosslink between residues
  MOD_RES (7)..(7): Ac3c
  MOD_RES (9)..(9): Alpha-methyl-L-cysteine connected by an i to i+7, seven-methylene crosslinker to another thiol-containing amino acid
  C-term NH2
FCAYWEXLCAAL

SEQ ID NO: 2080 - protein, 12 aa, Artificial Sequence
  Description of Artificial Sequence: Synthetic peptide
  N-term Ac
  MOD_RES (2)..(2): Alpha-methyl-D-cysteine connected by an i to i+7, seven-methylene crosslinker to another thiol-containing amino acid
  misc_feature (2)..(9): Crosslink between residues
  MOD_RES (7)..(7): Ac3c
  MOD_RES (9)..(9): Alpha-methyl-L-cysteine connected by an i to i+7, seven-methylene crosslinker to another thiol-containing amino acid
  C-term NH2
FCAYWEXLCAAM

SEQ ID NO: 2081 - protein, 12 aa, Artificial Sequence
  Description of Artificial Sequence: Synthetic peptide
  N-term Ac
  MOD_RES (2)..(2): Alpha-methyl-D-cysteine connected by an i to i+7, seven-methylene crosslinker to another thiol-containing amino acid
  misc_feature (2)..(9): Crosslink between residues
  MOD_RES (7)..(7): Ac3c
  MOD_RES (9)..(9): Alpha-methyl-L-cysteine connected by an i to i+7, seven-methylene crosslinker to another thiol-containing amino acid
  MOD_RES (12)..(12): homo-Leu
  C-term NH2
FCAYWEXLCAAL

SEQ ID NO: 2082 - protein, 12 aa, Artificial Sequence
  Description of Artificial Sequence: Synthetic peptide
  N-term Ac
  MOD_RES (2)..(2): Alpha-methyl-D-cysteine connected by an i to i+7, seven-methylene crosslinker to another thiol-containing amino acid
  misc_feature (2)..(9): Crosslink between residues
  MOD_RES (7)..(7): Ac3c
  MOD_RES (9)..(9): Alpha-methyl-L-cysteine connected by an i to i+7, seven-methylene crosslinker to another thiol-containing amino acid
  C-term NH2
FCAYWEXLCAAF

SEQ ID NO: 2083 - protein, 12 aa, Artificial Sequence
  Description of Artificial Sequence: Synthetic peptide
  N-term Ac
  MOD_RES (2)..(2): Alpha-methyl-D-cysteine connected by an i to i+7, seven-methylene crosslinker to another thiol-containing amino acid
  misc_feature (2)..(9): Crosslink between residues
  MOD_RES (7)..(7): Ac3c
  MOD_RES (9)..(9): Alpha-methyl-L-cysteine connected by an i to i+7, seven-methylene crosslinker to another thiol-containing amino acid
  C-term NH2
FCAYWEXLCAAI

SEQ ID NO: 2084 - protein, 12 aa, Artificial Sequence
  Description of Artificial Sequence: Synthetic peptide
  N-term Ac
  MOD_RES (2)..(2): Alpha-methyl-D-cysteine connected by an i to i+7, seven-methylene crosslinker to another thiol-containing amino acid
  misc_feature (2)..(9): Crosslink between residues
  MOD_RES (7)..(7): Ac3c
  MOD_RES (9)..(9): Alpha-methyl-L-cysteine connected by an i to i+7, seven-methylene crosslinker to another thiol-containing amino acid
  MOD_RES (12)..(12): Cyclohexyl-Gly
  C-term NH2
FCAYWEXLCAAG

SEQ ID NO: 2085 - protein, 12 aa, Artificial Sequence
  Description of Artificial Sequence: Synthetic peptide
  N-term Ac
  MOD_RES (2)..(2): Alpha-methyl-D-cysteine connected by an i to i+7, seven-methylene crosslinker to another thiol-containing amino acid
  misc_feature (2)..(9): Crosslink between residues
  MOD_RES (7)..(7): Ac3c
  MOD_RES (9)..(9): Alpha-methyl-L-cysteine connected by an i to i+7, seven-methylene crosslinker to another thiol-containing amino acid
  MOD_RES (12)..(12): Cyclohexyl-Ala
  C-term NH2
FCAYWEXLCAAA

SEQ ID NO: 2086 - protein, 12 aa, Artificial Sequence
  Description of Artificial Sequence: Synthetic peptide
  N-term Ac
  MOD_RES (2)..(2): Alpha-methyl-D-cysteine connected by an i to i+7, seven-methylene crosslinker to another thiol-containing amino acid
  misc_feature (2)..(9): Crosslink between residues
  MOD_RES (7)..(7): Ac3c
  MOD_RES (9)..(9): Alpha-methyl-L-cysteine connected by an i to i+7, seven-methylene crosslinker to another thiol-containing amino acid
  MOD_RES (12)..(12): 2-aminoisobutyric acid
  C-term NH2
FCAYWEXLCAAX

SEQ ID NO: 2087 - protein, 15 aa, Artificial Sequence
  Description of Artificial Sequence: Synthetic peptide
  N-term Ac
  MOD_RES (4)..(4): Alpha-methyl-D-cysteine connected by an i to i+7, seven-methylene crosslinker to another thiol-containing amino acid
  misc_feature (4)..(11): Crosslink between residues
  MOD_RES (11)..(11): Alpha-methyl-L-cysteine connected by an i to i+7, seven-methylene crosslinker to another thiol-containing amino acid
  MOD_RES (14)..(14): 2-aminoisobutyric acid
  C-term NH2
LTFCAYWAQLCAAXV

SEQ ID NO: 2088 - protein, 15 aa, Artificial Sequence
  Description of Artificial Sequence: Synthetic peptide
  N-term Ac
  MOD_RES (4)..(4): Alpha-methyl-D-cysteine connected by an i to i+7, seven-methylene crosslinker to another thiol-containing amino acid
  misc_feature (4)..(11): Crosslink between residues
  MOD_RES (11)..(11): Alpha-methyl-L-cysteine connected by an i to i+7, seven-methylene crosslinker to another thiol-containing amino acid
  MOD_RES (14)..(14): 2-aminoisobutyric acid
  C-term NH2
LTFCAYWAQLCAAXV

SEQ ID NO: 2089 - protein, 15 aa, Artificial Sequence
  Description of Artificial Sequence: Synthetic peptide
  N-term Ac
  MOD_RES (4)..(4): Alpha-methyl-D-cysteine connected by an i to i+7, seven-methylene crosslinker to another thiol-containing amino acid
  misc_feature (4)..(11): Crosslink between residues
  MOD_RES (11)..(11): Alpha-methyl-L-cysteine connected by an i to i+7, seven-methylene crosslinker to another thiol-containing amino acid
  MOD_RES (13)..(13): 2-aminoisobutyric acid
  C-term NH2
LTFCAYWAQLCSXAA

SEQ ID NO: 2090 - protein, 15 aa, Artificial Sequence
  Description of Artificial Sequence: Synthetic peptide
  N-term Ac
  MOD_RES (4)..(4): Alpha-methyl-D-cysteine connected by an i to i+7, seven-methylene crosslinker to another thiol-containing amino acid
  misc_feature (4)..(11): Crosslink between residues
  MOD_RES (11)..(11): Alpha-methyl-L-cysteine connected by an i to i+7, seven-methylene crosslinker to another thiol-containing amino acid
  MOD_RES (13)..(13): 2-aminoisobutyric acid
  C-term NH2
LTFCAYWAQLCSXAA

SEQ ID NO: 2091 - protein, 16 aa, Artificial Sequence
  Description of Artificial Sequence: Synthetic peptide
  N-term Ac
  MOD_RES (5)..(5): Alpha-methyl-D-cysteine connected by an i to i+7, seven-methylene crosslinker to another thiol-containing amino acid
  misc_feature (5)..(12): Crosslink between residues
  MOD_RES (12)..(12): Alpha-methyl-L-cysteine connected by an i to i+7, seven-methylene crosslinker to another thiol-containing amino acid
  MOD_RES (15)..(16): Norleucine
  C-term NH2
HLTFCHHWHQLCAALL

SEQ ID NO: 2092 - protein, 16 aa, Artificial Sequence
  Description of Artificial Sequence: Synthetic peptide
  N-term Ac
  MOD_RES (5)..(5): Alpha-methyl-D-cysteine connected by an i to i+7, seven-methylene crosslinker to another thiol-containing amino acid
  misc_feature (5)..(12): Crosslink between residues
  MOD_RES (12)..(12): Alpha-methyl-L-cysteine connected by an i to i+7, seven-methylene crosslinker to another thiol-containing amino acid
  C-term NH2
DLTFCHHWHQLCRRLV

SEQ ID NO: 2093 - protein, 16 aa, Artificial Sequence
  Description of Artificial Sequence: Synthetic peptide
  N-term Ac
  MOD_RES (5)..(5): Alpha-methyl-D-cysteine connected by an i to i+7, seven-methylene crosslinker to another thiol-containing amino acid
  misc_feature (5)..(12): Crosslink between residues
  MOD_RES (12)..(12): Alpha-methyl-L-cysteine connected by an i to i+7, seven-methylene crosslinker to another thiol-containing amino acid
  C-term NH2
HHTFCHHWHQLCAAML

SEQ ID NO: 2094 - protein, 13 aa, Artificial Sequence
  Description of Artificial Sequence: Synthetic peptide
  N-term Ac
  MOD_RES (2)..(2): Alpha-methyl-D-cysteine connected by an i to i+7, seven-methylene crosslinker to another thiol-containing amino acid
  misc_feature (2)..(9): Crosslink between residues
  MOD_RES (9)..(9): Alpha-methyl-L-cysteine connected by an i to i+7, seven-methylene crosslinker to another thiol-containing amino acid
  MOD_RES (13)..(13): Cyclohexyl-Ala
  C-term NH2
FCHHWHQLCRRDA

SEQ ID NO: 2095 - protein, 13 aa, Artificial Sequence
  Description of Artificial Sequence: Synthetic peptide
  N-term Ac
  MOD_RES (2)..(2): Alpha-methyl-D-cysteine connected by an i to i+7, seven-methylene crosslinker to another thiol-containing amino acid
  misc_feature (2)..(9): Crosslink between residues
  MOD_RES (9)..(9): Alpha-methyl-L-cysteine connected by an i to i+7, seven-methylene crosslinker to another thiol-containing amino acid
  C-term NH2
FCHHWHQLCHRFV

SEQ ID NO: 2096 - protein, 16 aa, Artificial Sequence
  Description of Artificial Sequence: Synthetic peptide
  N-term Ac
  MOD_RES (5)..(5): Alpha-methyl-D-cysteine connected by an i to i+7, seven-methylene crosslinker to another thiol-containing amino acid
  misc_feature (5)..(12): Crosslink between residues
  MOD_RES (12)..(12): Alpha-methyl-L-cysteine connected by an i to i+7, seven-methylene crosslinker to another thiol-containing amino acid
  MOD_RES (15)..(15): homo-Leu
  C-term NH2
HLTFCHHWHQLCAALA

SEQ ID NO: 2097 - protein, 16 aa, Artificial Sequence
  Description of Artificial Sequence: Synthetic peptide
  N-term Ac
  MOD_RES (5)..(5): Alpha-methyl-D-cysteine connected by an i to i+7, seven-methylene crosslinker to another thiol-containing amino acid
  misc_feature (5)..(12): Crosslink between residues
  MOD_RES (12)..(12): Alpha-methyl-L-cysteine connected by an i to i+7, seven-methylene crosslinker to another thiol-containing amino acid
  MOD_RES (15)..(15): Cyclohexyl-Gly
  MOD_RES (16)..(16): D-amino acid
  C-term NH2
DLTFCHHWHQLCRRGL

SEQ ID NO: 2098 - protein, 16 aa, Artificial Sequence
  Description of Artificial Sequence: Synthetic peptide
  N-term Ac
  MOD_RES (5)..(5): Alpha-methyl-D-cysteine connected by an i to i+7, seven-methylene crosslinker to another thiol-containing amino acid
  misc_feature (5)..(12): Crosslink between residues
  MOD_RES (12)..(12): Alpha-methyl-L-cysteine connected by an i to i+7, seven-methylene crosslinker to another thiol-containing amino acid
  MOD_RES (15)..(15): Cyclohexyl-Gly
  MOD_RES (16)..(16): D-amino acid
  C-term NH2
DLTFCHHWHQLCRRGL

SEQ ID NO: 2099 - protein, 16 aa, Artificial Sequence
  Description of Artificial Sequence: Synthetic peptide
  N-term Ac
  MOD_RES (5)..(5): Alpha-methyl-D-cysteine connected by an i to i+7, seven-methylene crosslinker to another thiol-containing amino acid
  misc_feature (5)..(12): Crosslink between residues
  MOD_RES (12)..(12): Alpha-methyl-L-cysteine connected by an i to i+7, seven-methylene crosslinker to another thiol-containing amino acid
  MOD_RES (15)..(15): Cyclohexyl-Ala
  MOD_RES (16)..(16): D-amino acid
  C-term NH2
HHTFCHHWHQLCAAAV

SEQ ID NO: 2100 - protein, 13 aa, Artificial Sequence
  Description of Artificial Sequence: Synthetic peptide
  N-term Ac
  MOD_RES (2)..(2): Alpha-methyl-D-cysteine connected by an i to i+7, seven-methylene crosslinker to another thiol-containing amino acid
  misc_feature (2)..(9): Crosslink between residues
  MOD_RES (9)..(9): Alpha-methyl-L-cysteine connected by an i to i+7, seven-methylene crosslinker to another thiol-containing amino acid
  MOD_RES (13)..(13): D-amino acid
  C-term NH2
FCHHWHQLCRRDA

SEQ ID NO: 2101 - protein, 13 aa, Artificial Sequence
  Description of Artificial Sequence: Synthetic peptide
  N-term Ac
  MOD_RES (2)..(2): Alpha-methyl-D-cysteine connected by an i to i+7, seven-methylene crosslinker to another thiol-containing amino acid
  misc_feature (2)..(9): Crosslink between residues
  MOD_RES (9)..(9): Alpha-methyl-L-cysteine connected by an i to i+7, seven-methylene crosslinker to another thiol-containing amino acid
  MOD_RES (12)..(12): 2-aminoisobutyric acid
  C-term NH2
FCHHWHQLCHRXG

SEQ ID NO: 2102 - protein, 13 aa, Artificial Sequence
  Description of Artificial Sequence: Synthetic peptide
  N-term Ac
  MOD_RES (2)..(2): Alpha-methyl-D-cysteine connected by an i to i+7, seven-methylene crosslinker to another thiol-containing amino acid
  misc_feature (2)..(9): Crosslink between residues
  MOD_RES (9)..(9): Alpha-methyl-L-cysteine connected by an i to i+7, seven-methylene crosslinker to another thiol-containing amino acid
  MOD_RES (12)..(12): Norleucine
  C-term NH2
FCAYWAQLCHHLL

SEQ ID NO: 2103 - protein, 13 aa, Artificial Sequence
  Description of Artificial Sequence: Synthetic peptide
  N-term Ac
  MOD_RES (2)..(2): Alpha-methyl-D-cysteine connected by an i to i+7, seven-methylene crosslinker to another thiol-containing amino acid
  misc_feature (2)..(9): Crosslink between residues
  MOD_RES (9)..(9): Alpha-methyl-L-cysteine connected by an i to i+7, seven-methylene crosslinker to another thiol-containing amino acid
  MOD_RES (13)..(13): Norleucine
  C-term NH2
FCAYWSALCHQAL

SEQ ID NO: 2104 - protein, 13 aa, Artificial Sequence
  Description of Artificial Sequence: Synthetic peptide
  N-term Ac
  MOD_RES (2)..(2): Alpha-methyl-D-cysteine connected by an i to i+7, seven-methylene crosslinker to another thiol-containing amino acid
  misc_feature (2)..(9): Crosslink between residues
  MOD_RES (9)..(9): Alpha-methyl-L-cysteine connected by an i to i+7, seven-methylene crosslinker to another thiol-containing amino acid
  MOD_RES (12)..(12): Cyclohexyl-Gly
  MOD_RES (13)..(13): D-amino acid
  C-term NH2
FCAYWVQLCQHGL

SEQ ID NO: 2105 - protein, 13 aa, Artificial Sequence
  Description of Artificial Sequence: Synthetic peptide
  N-term Ac
  MOD_RES (2)..(2): Alpha-methyl-D-cysteine connected by an i to i+7, seven-methylene crosslinker to another thiol-containing amino acid
  misc_feature (2)..(9): Crosslink between residues
  MOD_RES (9)..(9): Alpha-methyl-L-cysteine connected by an i to i+7, seven-methylene crosslinker to another thiol-containing amino acid
  MOD_RES (12)..(12): Norleucine
  MOD_RES (13)..(13): D-amino acid
  C-term NH2
FCAYWTALCQQLV

SEQ ID NO: 2106 - protein, 13 aa, Artificial Sequence
  Description of Artificial Sequence: Synthetic peptide
  N-term Ac
  MOD_RES (2)..(2): Alpha-methyl-D-cysteine connected by an i to i+7, seven-methylene crosslinker to another thiol-containing amino acid
  misc_feature (2)..(9): Crosslink between residues
  MOD_RES (9)..(9): Alpha-methyl-L-cysteine connected by an i to i+7, seven-methylene crosslinker to another thiol-containing amino acid
  MOD_RES (11)..(11): 2-aminoisobutyric acid
  MOD_RES (13)..(13): D-amino acid
  C-term NH2
FCAYWYQLCHXAA

SEQ ID NO: 2107 - protein, 15 aa, Artificial Sequence
  Description of Artificial Sequence: Synthetic peptide
  N-term Ac
  MOD_RES (4)..(4): Alpha-methyl-D-cysteine connected by an i to i+7, seven-methylene crosslinker to another thiol-containing amino acid
  misc_feature (4)..(11): Crosslink between residues
  MOD_RES (11)..(11): Alpha-methyl-L-cysteine connected by an i to i+7, seven-methylene crosslinker to another thiol-containing amino acid
  MOD_RES (15)..(15): D-amino acid
  C-term NH2
LTFCAYWAQLCHHLA

SEQ ID NO: 2108 - protein, 15 aa, Artificial Sequence
  Description of Artificial Sequence: Synthetic peptide
  N-term Ac
  MOD_RES (4)..(4): Alpha-methyl-D-cysteine connected by an i to i+7, seven-methylene crosslinker to another thiol-containing amino acid
  misc_feature (4)..(11): Crosslink between residues
  MOD_RES (11)..(11): Alpha-methyl-L-cysteine connected by an i to i+7, seven-methylene crosslinker to another thiol-containing amino acid
  MOD_RES (15)..(15): D-amino acid
  C-term NH2
LTFCAYWAQLCHHLA

SEQ ID NO: 2109 - protein, 15 aa, Artificial Sequence
  Description of Artificial Sequence: Synthetic peptide
  N-term Ac
  MOD_RES (4)..(4): Alpha-methyl-D-cysteine connected by an i to i+7, seven-methylene crosslinker to another thiol-containing amino acid
  misc_feature (4)..(11): Crosslink between residues
  MOD_RES (11)..(11): Alpha-methyl-L-cysteine connected by an i to i+7, seven-methylene crosslinker to another thiol-containing amino acid
  MOD_RES (14)..(14): Norleucine
  MOD_RES (15)..(15): D-amino acid
  C-term NH2
LTFCAYWAQLCHQLV

SEQ ID NO: 2110 - protein, 15 aa, Artificial Sequence
  Description of Artificial Sequence: Synthetic peptide
  N-term Ac
  MOD_RES (4)..(4): Alpha-methyl-D-cysteine connected by an i to i+7, seven-methylene crosslinker to another thiol-containing amino acid
  misc_feature (4)..(11): Crosslink between residues
  MOD_RES (11)..(11): Alpha-methyl-L-cysteine connected by an i to i+7, seven-methylene crosslinker to another thiol-containing amino acid
  MOD_RES (14)..(14): Norleucine
  MOD_RES (15)..(15): D-amino acid
  C-term NH2
LTFCAYWAQLCHQLV

SEQ ID NO: 2111 - protein, 15 aa, Artificial Sequence
  Description of Artificial Sequence: Synthetic peptide
  N-term Ac
  MOD_RES (4)..(4): Alpha-methyl-D-cysteine connected by an i to i+7, seven-methylene crosslinker to another thiol-containing amino acid
  misc_feature (4)..(11): Crosslink between residues
  MOD_RES (11)..(11): Alpha-methyl-L-cysteine connected by an i to i+7, seven-methylene crosslinker to another thiol-containing amino acid
  MOD_RES (15)..(15): D-amino acid
  C-term NH2
LTFCAYWAQLCQQML

SEQ ID NO: 2112 - protein, 15 aa, Artificial Sequence
  Description of Artificial Sequence: Synthetic peptide
  N-term Ac
  MOD_RES (4)..(4): Alpha-methyl-D-cysteine connected by an i to i+7, seven-methylene crosslinker to another thiol-containing amino acid
  misc_feature (4)..(11): Crosslink between residues
  MOD_RES (11)..(11): Alpha-methyl-L-cysteine connected by an i to i+7, seven-methylene crosslinker to another thiol-containing amino acid
  MOD_RES (15)..(15): D-amino acid
  C-term NH2
LTFCAYWAQLCQQML

SEQ ID NO: 2113 - protein, 15 aa, Artificial Sequence
  Description of Artificial Sequence: Synthetic peptide
  N-term Ac
  MOD_RES (4)..(4): Alpha-methyl-D-cysteine connected by an i to i+7, seven-methylene crosslinker to another thiol-containing amino acid
  misc_feature (4)..(11): Crosslink between residues
  MOD_RES (11)..(11): Alpha-methyl-L-cysteine connected by an i to i+7, seven-methylene crosslinker to another thiol-containing amino acid
  MOD_RES (13)..(13): 2-aminoisobutyric acid
  MOD_RES (14)..(14): homo-Leu
  C-term NH2
LTFCAYWAQLCHXLV

SEQ ID NO: 2114 - protein, 15 aa, Artificial Sequence
  Description of Artificial Sequence: Synthetic peptide
  N-term Ac
  MOD_RES (4)..(4): Alpha-methyl-D-cysteine connected by an i to i+7, seven-methylene crosslinker to another thiol-containing amino acid
  misc_feature (4)..(11): Crosslink between residues
  MOD_RES (11)..(11): Alpha-methyl-L-cysteine connected by an i to i+7, seven-methylene crosslinker to another thiol-containing amino acid
  C-term NH2
LTFCAYWAQLCAHFA

SEQ ID NO: 2115 - protein, 16 aa, Artificial Sequence
  Description of Artificial Sequence: Synthetic peptide
  N-term Ac
  MOD_RES (5)..(5): Alpha-methyl-D-cysteine connected by an i to i+7, seven-methylene crosslinker to another thiol-containing amino acid
  misc_feature (5)..(12): Crosslink between residues
  MOD_RES (12)..(12): Alpha-methyl-L-cysteine connected by an i to i+7, seven-methylene crosslinker to another thiol-containing amino acid
  MOD_RES (15)..(15): Norleucine
  MOD_RES (16)..(16): D-amino acid
  C-term NH2
HLTFCHHWHQLCAALL

SEQ ID NO: 2116 - protein, 16 aa, Artificial Sequence
  Description of Artificial Sequence: Synthetic peptide
  N-term Ac
  MOD_RES (5)..(5): Alpha-methyl-D-cysteine connected by an i to i+7, seven-methylene crosslinker to another thiol-containing amino acid
  misc_feature (5)..(12): Crosslink between residues
  MOD_RES (12)..(12): Alpha-methyl-L-cysteine connected by an i to i+7, seven-methylene crosslinker to another thiol-containing amino acid
  MOD_RES (16)..(16): D-amino acid
  C-term NH2
DLTFCHHWHQLCRRLA

SEQ ID NO: 2117 - protein, 16 aa, Artificial Sequence
  Description of Artificial Sequence: Synthetic peptide
  N-term Ac
  MOD_RES (5)..(5): Alpha-methyl-D-cysteine connected by an i to i+7, seven-methylene crosslinker to another thiol-containing amino acid
  misc_feature (5)..(12): Crosslink between residues
  MOD_RES (12)..(12): Alpha-methyl-L-cysteine connected by an i to i+7, seven-methylene crosslinker to another thiol-containing amino acid
  MOD_RES (16)..(16): D-amino acid
  C-term NH2
HHTFCHHWHQLCAAMV

SEQ ID NO: 2118 - protein, 13 aa, Artificial Sequence
  Description of Artificial Sequence: Synthetic peptide
  N-term Ac
  MOD_RES (2)..(2): Alpha-methyl-D-cysteine connected by an i to i+7, seven-methylene crosslinker to another thiol-containing amino acid
  misc_feature (2)..(9): Crosslink between residues
  MOD_RES (9)..(9): Alpha-methyl-L-cysteine connected by an i to i+7, seven-methylene crosslinker to another thiol-containing amino acid
  C-term NH2
FCHHWHQLCRRDA

SEQ ID NO: 2119 - protein, 13 aa, Artificial Sequence
  Description of Artificial Sequence: Synthetic peptide
  N-term Ac
  MOD_RES (2)..(2): Alpha-methyl-D-cysteine connected by an i to i+7, seven-methylene crosslinker to another thiol-containing amino acid
  misc_feature (2)..(9): Crosslink between residues
  MOD_RES (9)..(9): Alpha-methyl-L-cysteine connected by an i to i+7, seven-methylene crosslinker to another thiol-containing amino acid
  MOD_RES (13)..(13): Cyclohexyl-Ala
  C-term NH2
FCHHWHQLCHRFA

SEQ ID NO: 2120 - protein, 11 aa, Artificial Sequence
  Description of Artificial Sequence: Synthetic peptide
  N-term Ac
  MOD_RES (2)..(2): Alpha-methyl-D-cysteine connected by an i to i+7, seven-methylene crosslinker to another thiol-containing amino acid
  misc_feature (2)..(9): Crosslink between residues
  MOD_RES (9)..(9): Alpha-methyl-L-cysteine connected by an i to i+7, seven-methylene crosslinker to another thiol-containing amino acid
  C-term NHAm
FCAYWEALCAA

SEQ ID NO: 2121 - protein, 11 aa, Artificial Sequence
  Description of Artificial Sequence: Synthetic peptide
  N-term Ac
  MOD_RES (2)..(2): Alpha-methyl-D-cysteine connected by an i to i+7, seven-methylene crosslinker to another thiol-containing amino acid
  misc_feature (2)..(9): Crosslink between residues
  MOD_RES (9)..(9): Alpha-methyl-L-cysteine connected by an i to i+7, seven-methylene crosslinker to another thiol-containing amino acid
  C-term NHiAm
FCAYWEALCAA

SEQ ID NO: 2122 - protein, 11 aa, Artificial Sequence
  Description of Artificial Sequence: Synthetic peptide
  N-term Ac
  MOD_RES (2)..(2): Alpha-methyl-D-cysteine connected by an i to i+7, seven-methylene crosslinker to another thiol-containing amino acid
  misc_feature (2)..(9): Crosslink between residues
  MOD_RES (9)..(9): Alpha-methyl-L-cysteine connected by an i to i+7, seven-methylene crosslinker to another thiol-containing amino acid
  C-term NHnPr3Ph
FCAYWEALCAA

SEQ ID NO: 2123 - protein, 11 aa, Artificial Sequence
  Description of Artificial Sequence: Synthetic peptide
  N-term Ac
  MOD_RES (2)..(2): Alpha-methyl-D-cysteine connected by an i to i+7, seven-methylene crosslinker to another thiol-containing amino acid
  misc_feature (2)..(9): Crosslink between residues
  MOD_RES (9)..(9): Alpha-methyl-L-cysteine connected by an i to i+7, seven-methylene crosslinker to another thiol-containing amino acid
  C-term NHnBu33Me
FCAYWEALCAA

SEQ ID NO: 2124 - protein, 11 aa, Artificial Sequence
  Description of Artificial Sequence: Synthetic peptide
  N-term Ac
  MOD_RES (2)..(2): Alpha-methyl-D-cysteine connected by an i to i+7, seven-methylene crosslinker to another thiol-containing amino acid
  misc_feature (2)..(9): Crosslink between residues
  MOD_RES (9)..(9): Alpha-methyl-L-cysteine connected by an i to i+7, seven-methylene crosslinker to another thiol-containing amino acid
  C-term NHnPr
FCAYWEALCAA

SEQ ID NO: 2125 - protein, 11 aa, Artificial Sequence
  Description of Artificial Sequence: Synthetic peptide
  N-term Ac
  MOD_RES (2)..(2): Alpha-methyl-D-cysteine connected by an i to i+7, seven-methylene crosslinker to another thiol-containing amino acid
  misc_feature (2)..(9): Crosslink between residues
  MOD_RES (9)..(9): Alpha-methyl-L-cysteine connected by an i to i+7, seven-methylene crosslinker to another thiol-containing amino acid
  C-term NHnEt2Ch
FCAYWEALCAA

SEQ ID NO: 2126 - protein, 11 aa, Artificial Sequence
  Description of Artificial Sequence: Synthetic peptide
  N-term Ac
  MOD_RES (2)..(2): Alpha-methyl-D-cysteine connected by an i to i+7, seven-methylene crosslinker to another thiol-containing amino acid
  misc_feature (2)..(9): Crosslink between residues
  MOD_RES (9)..(9): Alpha-methyl-L-cysteine connected by an i to i+7, seven-methylene crosslinker to another thiol-containing amino acid
  C-term NHnEt2Cp
FCAYWEALCAA

SEQ ID NO: 2127 - protein, 11 aa, Artificial Sequence
  Description of Artificial Sequence: Synthetic peptide
  N-term Ac
  MOD_RES (2)..(2): Alpha-methyl-D-cysteine connected by an i to i+7, seven-methylene crosslinker to another thiol-containing amino acid
  misc_feature (2)..(9): Crosslink between residues
  MOD_RES (9)..(9): Alpha-methyl-L-cysteine connected by an i to i+7, seven-methylene crosslinker to another thiol-containing amino acid
  C-term NHHex
FCAYWEALCAA

SEQ ID NO: 2128 - protein, 15 aa, Artificial Sequence
  Description of Artificial Sequence: Synthetic peptide
  N-term Ac
  MOD_RES (4)..(4): Alpha-methyl-D-cysteine connected by an i to i+7, seven-methylene crosslinker to another thiol-containing amino acid
  misc_feature (4)..(11): Crosslink between residues
  MOD_RES (11)..(11): Alpha-methyl-L-cysteine connected by an i to i+7, seven-methylene crosslinker to another thiol-containing amino acid
  C-term NH2
LTFCAYWAQLCAAIA

SEQ ID NO: 2129 - protein, 15 aa, Artificial Sequence
  Description of Artificial Sequence: Synthetic peptide
  N-term Ac
  MOD_RES (4)..(4): Alpha-methyl-D-cysteine connected by an i to i+7, seven-methylene crosslinker to another thiol-containing amino acid
  misc_feature (4)..(11): Crosslink between residues
  MOD_RES (11)..(11): Alpha-methyl-L-cysteine connected by an i to i+7, seven-methylene crosslinker to another thiol-containing amino acid
  C-term NH2
LTFCAYWAQLCAAIA

SEQ ID NO: 2130 - protein, 15 aa, Artificial Sequence
  Description of Artificial Sequence: Synthetic peptide
  N-term Ac
  MOD_RES (4)..(4): Alpha-methyl-D-cysteine connected by an i to i+7, seven-methylene crosslinker to another thiol-containing amino acid
  misc_feature (4)..(11): Crosslink between residues
  MOD_RES (11)..(11): Alpha-methyl-L-cysteine connected by an i to i+7, seven-methylene crosslinker to another thiol-containing amino acid
  C-term NH2
LTFCAYWAALCAAMA

SEQ ID NO: 2131 - protein, 15 aa, Artificial Sequence
  Description of Artificial Sequence: Synthetic peptide
  N-term Ac
  MOD_RES (4)..(4): Alpha-methyl-D-cysteine connected by an i to i+7, seven-methylene crosslinker to another thiol-containing amino acid
  misc_feature (4)..(11): Crosslink between residues
  MOD_RES (11)..(11): Alpha-methyl-L-cysteine connected by an i to i+7, seven-methylene crosslinker to another thiol-containing amino acid
  C-term NH2
LTFCAYWAALCAAMA

SEQ ID NO: 2132 - protein, 15 aa, Artificial Sequence
  Description of Artificial Sequence: Synthetic peptide
  N-term Ac
  MOD_RES (4)..(4): Alpha-methyl-D-cysteine connected by an i to i+7, seven-methylene crosslinker to another thiol-containing amino acid
  misc_feature (4)..(11): Crosslink between residues
  MOD_RES (11)..(11): Alpha-methyl-L-cysteine connected by an i to i+7, seven-methylene crosslinker to another thiol-containing amino acid
  MOD_RES (14)..(14): Norleucine
  C-term NH2
LTFCAYWAQLCAALA

SEQ ID NO: 2133 - protein, 15 aa, Artificial Sequence
  Description of Artificial Sequence: Synthetic peptide
  N-term Ac
  MOD_RES (4)..(4): Alpha-methyl-D-cysteine connected by an i to i+7, seven-methylene crosslinker to another thiol-containing amino acid
  misc_feature (4)..(11): Crosslink between residues
  MOD_RES (11)..(11): Alpha-methyl-L-cysteine connected by an i to i+7, seven-methylene crosslinker to another thiol-containing amino acid
  MOD_RES (14)..(14): Norleucine
  C-term NH2
LTFCAYWAQLCAALA

SEQ ID NO: 2134 - protein, 15 aa, Artificial Sequence
  Description of Artificial Sequence: Synthetic peptide
  N-term Ac
  MOD_RES (4)..(4): Alpha-methyl-D-cysteine connected by an i to i+7, seven-methylene crosslinker to another thiol-containing amino acid
  misc_feature (4)..(11): Crosslink between residues
  MOD_RES (11)..(11): Alpha-methyl-L-cysteine connected by an i to i+7, seven-methylene crosslinker to another thiol-containing amino acid
  MOD_RES (15)..(15): D-amino acid
  C-term NH2
LTFCAYWAQLCAAIA

SEQ ID NO: 2135 - protein, 15 aa, Artificial Sequence
  Description of Artificial Sequence: Synthetic peptide
  N-term Ac
  MOD_RES (4)..(4): Alpha-methyl-D-cysteine connected by an i to i+7, seven-methylene crosslinker to another thiol-containing amino acid
  misc_feature (4)..(11): Crosslink between residues
  MOD_RES (11)..(11): Alpha-methyl-L-cysteine connected by an i to i+7, seven-methylene crosslinker to another thiol-containing amino acid
  MOD_RES (15)..(15): D-amino acid
  C-term NH2
LTFCAYWAQLCAAIA

SEQ ID NO: 2136 - protein, 15 aa, Artificial Sequence
  Description of Artificial Sequence: Synthetic peptide
  N-term Ac
  MOD_RES (4)..(4): Alpha-methyl-D-cysteine connected by an i to i+7, seven-methylene crosslinker to another thiol-containing amino acid
  misc_feature (4)..(11): Crosslink between residues
  MOD_RES (11)..(11): Alpha-methyl-L-cysteine connected by an i to i+7, seven-methylene crosslinker to another thiol-containing amino acid
  MOD_RES (15)..(15): D-amino acid
  C-term NH2
LTFCAYWAALCAAMA

SEQ ID NO: 2137 - protein, 15 aa, Artificial Sequence
  Description of Artificial Sequence: Synthetic peptide
  N-term Ac
  MOD_RES (4)..(4): Alpha-methyl-D-cysteine connected by an i to i+7, seven-methylene crosslinker to another thiol-containing amino acid
  misc_feature (4)..(11): Crosslink between residues
  MOD_RES (11)..(11): Alpha-methyl-L-cysteine connected by an i to i+7, seven-methylene crosslinker to another thiol-containing amino acid
  MOD_RES (15)..(15): D-amino acid
  C-term NH2
LTFCAYWAALCAAMA

SEQ ID NO: 2138 - protein, 15 aa, Artificial Sequence
  Description of Artificial Sequence: Synthetic peptide
  N-term Ac
  MOD_RES (4)..(4): Alpha-methyl-D-cysteine connected by an i to i+7, seven-methylene crosslinker to another thiol-containing amino acid
  misc_feature (4)..(11): Crosslink between residues
  MOD_RES (11)..(11): Alpha-methyl-L-cysteine connected by an i to i+7, seven-methylene crosslinker to another thiol-containing amino acid
  MOD_RES (14)..(14): Norleucine
  MOD_RES (15)..(15): D-amino acid
  C-term NH2
LTFCAYWAQLCAALA

SEQ ID NO: 2139 - protein, 15 aa, Artificial Sequence
  Description of Artificial Sequence: Synthetic peptide
  N-term Ac
  MOD_RES (4)..(4): Alpha-methyl-D-cysteine connected by an i to i+7, seven-methylene crosslinker to another thiol-containing amino acid
  misc_feature (4)..(11): Crosslink between residues
  MOD_RES (11)..(11): Alpha-methyl-L-cysteine connected by an i to i+7, seven-methylene crosslinker to another thiol-containing amino acid
  MOD_RES (14)..(14): Norleucine
  MOD_RES (15)..(15): D-amino acid
  C-term NH2
LTFCAYWAQLCAALA

SEQ ID NO: 2140 - protein, 15 aa, Artificial Sequence
  Description of Artificial Sequence: Synthetic peptide
  N-term Ac
  MOD_RES (4)..(4): Alpha-methyl-D-cysteine connected by an i to i+7, seven-methylene crosslinker to another thiol-containing amino acid
  misc_feature (4)..(11): Crosslink between residues
  MOD_RES (11)..(11): Alpha-methyl-L-cysteine connected by an i to i+7, seven-methylene crosslinker to another thiol-containing amino acid
  MOD_RES (15)..(15): D-amino acid
  C-term NH2
LTFCAYWAALCAAIV

SEQ ID NO: 2141 - protein, 15 aa, Artificial Sequence
  Description of Artificial Sequence: Synthetic peptide
  N-term Ac
  MOD_RES (4)..(4): Alpha-methyl-D-cysteine connected by an i to i+7, seven-methylene crosslinker to another thiol-containing amino acid
  misc_feature (4)..(11): Crosslink between residues
  MOD_RES (11)..(11): Alpha-methyl-L-cysteine connected by an i to i+7, seven-methylene crosslinker to another thiol-containing amino acid
  MOD_RES (15)..(15): D-amino acid
  C-term NH2
LTFCAYWAALCAAIV

SEQ ID NO: 2142 - protein, 15 aa, Artificial Sequence
  Description of Artificial Sequence: Synthetic peptide
  N-term Ac
  MOD_RES (4)..(4): Alpha-methyl-D-cysteine connected by an i to i+7, seven-methylene crosslinker to another thiol-containing amino acid
  misc_feature (4)..(11): Crosslink between residues
  MOD_RES (11)..(11): Alpha-methyl-L-cysteine connected by an i to i+7, seven-methylene crosslinker to another thiol-containing amino acid
  MOD_RES (15)..(15): D-amino acid
  C-term NH2
LTFCAYWAQLCAAMV

SEQ ID NO: 2143 - protein, 15 aa, Artificial Sequence
  Description of Artificial Sequence: Synthetic peptide
  N-term Ac
  MOD_RES (4)..(4): Alpha-methyl-D-cysteine connected by an i to i+7, seven-methylene crosslinker to another thiol-containing amino acid
  misc_feature (4)..(11): Crosslink between residues
  MOD_RES (11)..(11): Alpha-methyl-L-cysteine connected by an i to i+7, seven-methylene crosslinker to another thiol-containing amino acid
  MOD_RES (14)..(14): Norleucine
  MOD_RES (15)..(15): D-amino acid
  C-term NH2
LTFCAYWAALCAALV

SEQ ID NO: 2144 - protein, 15 aa, Artificial Sequence
  Description of Artificial Sequence: Synthetic peptide
  N-term Ac
  MOD_RES (4)..(4): Alpha-methyl-D-cysteine connected by an i to i+7, seven-methylene crosslinker to another thiol-containing amino acid
  misc_feature (4)..(11): Crosslink between residues
  MOD_RES (11)..(11): Alpha-methyl-L-cysteine connected by an i to i+7, seven-methylene crosslinker to another thiol-containing amino acid
  MOD_RES (14)..(14): Norleucine
  MOD_RES (15)..(15): D-amino acid
  C-term NH2
LTFCAYWAALCAALV

SEQ ID NO: 2145 - protein, 15 aa, Artificial Sequence
  Description of Artificial Sequence: Synthetic peptide
  N-term Ac
  MOD_RES (4)..(4): Alpha-methyl-D-cysteine connected by an i to i+7, seven-methylene crosslinker to another thiol-containing amino acid
  misc_feature (4)..(11): Crosslink between residues
  MOD_RES (11)..(11): Alpha-methyl-L-cysteine connected by an i to i+7, seven-methylene crosslinker to another thiol-containing amino acid
  MOD_RES (15)..(15): D-amino acid
  C-term NH2
LTFCAYWAQLCAAIL

SEQ ID NO: 2146 - protein, 15 aa, Artificial Sequence
  Description of Artificial Sequence: Synthetic peptide
  N-term Ac
  MOD_RES (4)..(4): Alpha-methyl-D-cysteine connected by an i to i+7, seven-methylene crosslinker to another thiol-containing amino acid
  misc_feature (4)..(11): Crosslink between residues
  MOD_RES (11)..(11): Alpha-methyl-L-cysteine connected by an i to i+7, seven-methylene crosslinker to another thiol-containing amino acid
  MOD_RES (15)..(15): D-amino acid
  C-term NH2
LTFCAYWAQLCAAIL

SEQ ID NO: 2147 - protein, 15 aa, Artificial Sequence
  Description of Artificial Sequence: Synthetic peptide
  N-term Ac
  MOD_RES (4)..(4): Alpha-methyl-D-cysteine connected by an i to i+7, seven-methylene crosslinker to another thiol-containing amino acid
  misc_feature (4)..(11): Crosslink between residues
  MOD_RES (11)..(11): Alpha-methyl-L-cysteine connected by an i to i+7, seven-methylene crosslinker to another thiol-containing amino acid
  MOD_RES (15)..(15): D-amino acid
  C-term NH2
LTFCAYWAALCAAML

SEQ ID NO: 2148 - protein, 15 aa, Artificial Sequence
  Description of Artificial Sequence: Synthetic peptide
  N-term Ac
  MOD_RES (4)..(4): Alpha-methyl-D-cysteine connected by an i to i+7, seven-methylene crosslinker to another thiol-containing amino acid
  misc_feature (4)..(11): Crosslink between residues
  MOD_RES (11)..(11): Alpha-methyl-L-cysteine connected by an i to i+7, seven-methylene crosslinker to another thiol-containing amino acid
  MOD_RES (14)..(14): Norleucine
  MOD_RES (15)..(15): D-amino acid
  C-term NH2
LTFCAYWAQLCAALL

SEQ ID NO: 2149 - protein, 15 aa, Artificial Sequence
  Description of Artificial Sequence: Synthetic peptide
  N-term Ac
  MOD_RES (4)..(4): Alpha-methyl-D-cysteine connected by an i to i+7, seven-methylene crosslinker to another thiol-containing amino acid
  misc_feature (4)..(11): Crosslink between residues
  MOD_RES (11)..(11): Alpha-methyl-L-cysteine connected by an i to i+7, seven-methylene crosslinker to another thiol-containing amino acid
  MOD_RES (14)..(14): Norleucine
  MOD_RES (15)..(15): D-amino acid
  C-term NH2
LTFCAYWAQLCAALL

SEQ ID NO: 2150 - protein, 13 aa, Artificial Sequence
  Description of Artificial Sequence: Synthetic peptide
  N-term Ac
  MOD_RES (2)..(2): Alpha-methyl-D-cysteine connected by an i to i+7, seven-methylene crosslinker to another thiol-containing amino acid
  misc_feature (2)..(9): Crosslink between residues
  MOD_RES (9)..(9): Alpha-methyl-L-cysteine connected by an i to i+7, seven-methylene crosslinker to another thiol-containing amino acid
  C-term NH2
FCAYWEALCAAMA

SEQ ID NO: 2151 - protein, 13 aa, Artificial Sequence
  Description of Artificial Sequence: Synthetic peptide
  N-term Ac
  MOD_RES (2)..(2): Alpha-methyl-D-cysteine connected by an i to i+7, seven-methylene crosslinker to another thiol-containing amino acid
  misc_feature (2)..(9): Crosslink between residues
  MOD_RES (9)..(9): Alpha-methyl-L-cysteine connected by an i to i+7, seven-methylene crosslinker to another thiol-containing amino acid
  MOD_RES (12)..(12): Norleucine
  C-term NH2
FCAYWEALCAALA

SEQ ID NO: 2152 - protein, 13 aa, Artificial Sequence
  Description of Artificial Sequence: Synthetic peptide
  N-term Ac
  MOD_RES (2)..(2): Alpha-methyl-D-cysteine connected by an i to i+7, seven-methylene crosslinker to another thiol-containing amino acid
  misc_feature (2)..(9): Crosslink between residues
  MOD_RES (9)..(9): Alpha-methyl-L-cysteine connected by an i to i+7, seven-methylene crosslinker to another thiol-containing amino acid
  MOD_RES (13)..(13): D-amino acid
  C-term NH2
FCAYWEALCAAIA

SEQ ID NO: 2153 - protein, 13 aa, Artificial Sequence
  Description of Artificial Sequence: Synthetic peptide
  N-term Ac
  MOD_RES (2)..(2): Alpha-methyl-D-cysteine connected by an i to i+7, seven-methylene crosslinker to another thiol-containing amino acid
  misc_feature (2)..(9): Crosslink between residues
  MOD_RES (9)..(9): Alpha-methyl-L-cysteine connected by an i to i+7, seven-methylene crosslinker to another thiol-containing amino acid
  MOD_RES (13)..(13): D-amino acid
  C-term NH2
FCAYWEALCAAMA

SEQ ID NO: 2154 - protein, 13 aa, Artificial Sequence
  Description of Artificial Sequence: Synthetic peptide
  N-term Ac
  MOD_RES (2)..(2): Alpha-methyl-D-cysteine connected by an i to i+7, seven-methylene crosslinker to another thiol-containing amino acid
  misc_feature (2)..(9): Crosslink between residues
  MOD_RES (9)..(9): Alpha-methyl-L-cysteine connected by an i to i+7, seven-methylene crosslinker to another thiol-containing amino acid
  MOD_RES (12)..(12): Norleucine
  MOD_RES (13)..(13): D-amino acid
  C-term NH2
FCAYWEALCAALA

SEQ ID NO: 2155 - protein, 13 aa, Artificial Sequence
  Description of Artificial Sequence: Synthetic peptide
  N-term Ac
  MOD_RES (2)..(2): Alpha-methyl-D-cysteine connected by an i to i+7, seven-methylene crosslinker to another thiol-containing amino acid
  misc_feature (2)..(9): Crosslink between residues
  MOD_RES (9)..(9): Alpha-methyl-L-cysteine connected by an i to i+7, seven-methylene crosslinker to another thiol-containing amino acid
  MOD_RES (13)..(13): D-amino acid
  C-term NH2
FCAYWEALCAAIV

SEQ ID NO: 2156 - protein, 13 aa, Artificial Sequence
  Description of Artificial Sequence: Synthetic peptide
  N-term Ac
  MOD_RES (2)..(2): Alpha-methyl-D-cysteine connected by an i to i+7, seven-methylene crosslinker to another thiol-containing amino acid
  misc_feature (2)..(9): Crosslink between residues
  MOD_RES (9)..(9): Alpha-methyl-L-cysteine connected by an i to i+7, seven-methylene crosslinker to another thiol-containing amino acid
  MOD_RES (13)..(13): D-amino acid
  C-term NH2
FCAYWEALCAAMV

SEQ ID NO: 2157 - protein, 13 aa, Artificial Sequence
  Description of Artificial Sequence: Synthetic peptide
  N-term Ac
  MOD_RES (2)..(2): Alpha-methyl-D-cysteine connected by an i to i+7, seven-methylene crosslinker to another thiol-containing amino acid
  misc_feature (2)..(9): Crosslink between residues
  MOD_RES (9)..(9): Alpha-methyl-L-cysteine connected by an i to i+7, seven-methylene crosslinker to another thiol-containing amino acid
  MOD_RES (12)..(12): Norleucine
  MOD_RES (13)..(13): D-amino acid
  C-term NH2
FCAYWEALCAALV

SEQ ID NO: 2158 - protein, 13 aa, Artificial Sequence
  Description of Artificial Sequence: Synthetic peptide
  N-term Ac
  MOD_RES (2)..(2): Alpha-methyl-D-cysteine connected by an i to i+7, seven-methylene crosslinker to another thiol-containing amino acid
  misc_feature (2)..(9): Crosslink between residues
  MOD_RES (9)..(9): Alpha-methyl-L-cysteine connected by an i to i+7, seven-methylene crosslinker to another thiol-containing amino acid
  MOD_RES (13)..(13): D-amino acid
  C-term NH2
FCAYWEALCAAIL

SEQ ID NO: 2159 - protein, 13 aa, Artificial Sequence
  Description of Artificial Sequence: Synthetic peptide
  N-term Ac
  MOD_RES (2)..(2): Alpha-methyl-D-cysteine connected by an i to i+7, seven-methylene crosslinker to another thiol-containing amino acid
  misc_feature (2)..(9): Crosslink between residues
  MOD_RES (9)..(9): Alpha-methyl-L-cysteine connected by an i to i+7, seven-methylene crosslinker to another thiol-containing amino acid
  MOD_RES (13)..(13): D-amino acid
  C-term NH2
FCAYWEALCAAML

SEQ ID NO: 2160 - protein, 13 aa, Artificial Sequence
  Description of Artificial Sequence: Synthetic peptide
  N-term Ac
  MOD_RES (2)..(2): Alpha-methyl-D-cysteine connected by an i to i+7, seven-methylene crosslinker to another thiol-containing amino acid
  misc_feature (2)..(9): Crosslink between residues
  MOD_RES (9)..(9): Alpha-methyl-L-cysteine connected by an i to i+7, seven-methylene crosslinker to another thiol-containing amino acid
  MOD_RES (12)..(12): Norleucine
  MOD_RES (13)..(13): D-amino acid
  C-term NH2
FCAYWEALCAALL

SEQ ID NO: 2161 - protein, 13 aa, Artificial Sequence
  Description of Artificial Sequence: Synthetic peptide
  N-term Ac
  MOD_RES (2)..(2): Alpha-methyl-D-cysteine connected by an i to i+7, seven-methylene crosslinker to another thiol-containing amino acid
  misc_feature (2)..(9): Crosslink between residues
  MOD_RES (9)..(9): Alpha-methyl-L-cysteine connected by an i to i+7, seven-methylene crosslinker to another thiol-containing amino acid
  MOD_RES (12)..(12): Norleucine
  MOD_RES (13)..(13): D-amino acid
  C-term NH2
FCAYWEALCAALL

SEQ ID NO: 2162 - protein, 14 aa, Artificial Sequence
  Description of Artificial Sequence: Synthetic peptide
  N-term Ac
  MOD_RES (4)..(4): Alpha-methyl-D-cysteine connected by an i to i+7, seven-methylene crosslinker to another thiol-containing amino acid
  misc_feature (4)..(11): Crosslink between residues
  MOD_RES (7)..(7): 6cl-Trp
  MOD_RES (11)..(11): Alpha-methyl-L-cysteine connected by an i to i+7, seven-methylene crosslinker to another thiol-containing amino acid
  C-term NH2
LTFCAYWAQLCSAA

SEQ ID NO: 2163 - protein, 14 aa, Artificial Sequence
  Description of Artificial Sequence: Synthetic peptide
  N-term Ac
  MOD_RES (4)..(4): Alpha-methyl-D-cysteine connected by an i to i+7, seven-methylene crosslinker to another thiol-containing amino acid
  misc_feature (4)..(11): Crosslink between residues
  MOD_RES (7)..(7): 6cl-Trp
  MOD_RES (11)..(11): Alpha-methyl-L-cysteine connected by an i to i+7, seven-methylene crosslinker to another thiol-containing amino acid
  C-term NH2
LTFCAYWAQLCSAA

SEQ ID NO: 2164 - protein, 15 aa, Artificial Sequence
  Description of Artificial Sequence: Synthetic peptide
  N-term Ac
  MOD_RES (4)..(4): Alpha-methyl-D-cysteine connected by an i to i+7, seven-methylene crosslinker to another thiol-containing amino acid
  misc_feature (4)..(11): Crosslink between residues
  MOD_RES (11)..(11): Alpha-methyl-L-cysteine connected by an i to i+7, seven-methylene crosslinker to another thiol-containing amino acid
  MOD_RES (15)..(15): D-amino acid
  C-term NH2
WTFCFYWSQLCAVAA

SEQ ID NO: 2165 - protein, 15 aa, Artificial Sequence
  Description of Artificial Sequence: Synthetic peptide
  N-term Ac
  MOD_RES (4)..(4): Alpha-methyl-D-cysteine connected by an i to i+7, seven-methylene crosslinker to another thiol-containing amino acid
  misc_feature (4)..(11): Crosslink between residues
  MOD_RES (11)..(11): Alpha-methyl-L-cysteine connected by an i to i+7, seven-methylene crosslinker to another thiol-containing amino acid
  MOD_RES (15)..(15): D-amino acid
  C-term NH2
WTFCFYWSQLCAVAA

SEQ ID NO: 2166 - protein, 14 aa, Artificial Sequence
  Description of Artificial Sequence: Synthetic peptide
  N-term Ac
  MOD_RES (4)..(4): Alpha-methyl-D-cysteine connected by an i to i+7, seven-methylene crosslinker to another thiol-containing amino acid
  misc_feature (4)..(11): Crosslink between residues
  MOD_RES (11)..(11): Alpha-methyl-L-cysteine connected by an i to i+7, seven-methylene crosslinker to another thiol-containing amino acid
  C-term NH2
WTFCVYWSQLCAVA

SEQ ID NO: 2167 - protein, 14 aa, Artificial Sequence
  Description of Artificial Sequence: Synthetic peptide
  N-term Ac
  MOD_RES (4)..(4): Alpha-methyl-D-cysteine connected by an i to i+7, seven-methylene crosslinker to another thiol-containing amino acid
  misc_feature (4)..(11): Crosslink between residues
  MOD_RES (11)..(11): Alpha-methyl-L-cysteine connected by an i to i+7, seven-methylene crosslinker to another thiol-containing amino acid
  C-term NH2
WTFCVYWSQLCAVA

SEQ ID NO: 2168 - protein, 15 aa, Artificial Sequence
  Description of Artificial Sequence: Synthetic peptide
  N-term Ac
  MOD_RES (4)..(4): Alpha-methyl-D-cysteine connected by an i to i+7, seven-methylene crosslinker to another thiol-containing amino acid
  misc_feature (4)..(11): Crosslink between residues
  MOD_RES (11)..(11): Alpha-methyl-L-cysteine connected by an i to i+7, seven-methylene crosslinker to another thiol-containing amino acid
  MOD_RES (15)..(15): D-amino acid
  C-term NH2
WTFCFYWSQLCSAAA

SEQ ID NO: 2169 - protein, 15 aa, Artificial Sequence
  Description of Artificial Sequence: Synthetic peptide
  N-term Ac
  MOD_RES (4)..(4): Alpha-methyl-D-cysteine connected by an i to i+7, seven-methylene crosslinker to another thiol-containing amino acid
  misc_feature (4)..(11): Crosslink between residues
  MOD_RES (11)..(11): Alpha-methyl-L-cysteine connected by an i to i+7, seven-methylene crosslinker to another thiol-containing amino acid
  MOD_RES (15)..(15): D-amino acid
  C-term NH2
WTFCFYWSQLCSAAA

SEQ ID NO: 2170 - protein, 16 aa, Artificial Sequence
  Description of Artificial Sequence: Synthetic peptide
  N-term Ac
  MOD_RES (4)..(4): Alpha-methyl-D-cysteine connected by an i to i+7, seven-methylene crosslinker to another thiol-containing amino acid
  misc_feature (4)..(11): Crosslink between residues
  MOD_RES (11)..(11): Alpha-methyl-L-cysteine connected by an i to i+7, seven-methylene crosslinker to another thiol-containing amino acid
  MOD_RES (15)..(16): D-amino acid
  C-term NH2
WTFCVYWSQLCAVAAA

SEQ ID NO: 2171 - protein, 16 aa, Artificial Sequence
  Description of Artificial Sequence: Synthetic peptide
  N-term Ac
  MOD_RES (4)..(4): Alpha-methyl-D-cysteine connected by an i to i+7, seven-methylene crosslinker to another thiol-containing amino acid
  misc_feature (4)..(11): Crosslink between residues
  MOD_RES (11)..(11): Alpha-methyl-L-cysteine connected by an i to i+7, seven-methylene crosslinker to another thiol-containing amino acid
  MOD_RES (15)..(16): D-amino acid
  C-term NH2
WTFCVYWSQLCAVAAA

SEQ ID NO: 2172 - protein, 14 aa, Artificial Sequence
  Description of Artificial Sequence: Synthetic peptide
  N-term Ac
  MOD_RES (4)..(4): Alpha-methyl-D-cysteine connected by an i to i+7, seven-methylene crosslinker to another thiol-containing amino acid
  misc_feature (4)..(11): Crosslink between residues
  MOD_RES (11)..(11): Alpha-methyl-L-cysteine connected by an i to i+7, seven-methylene crosslinker to another thiol-containing amino acid
  C-term NH2
LTFCAYWAQLCAVG

SEQ ID NO: 2173 - protein, 14 aa, Artificial Sequence
  Description of Artificial Sequence: Synthetic peptide
  N-term Ac
  MOD_RES (4)..(4): Alpha-methyl-D-cysteine connected by an i to i+7, seven-methylene crosslinker to another thiol-containing amino acid
  misc_feature (4)..(11): Crosslink between residues
  MOD_RES (11)..(11): Alpha-methyl-L-cysteine connected by an i to i+7, seven-methylene crosslinker to another thiol-containing amino acid
  C-term NH2
LTFCAYWAQLCAVG

SEQ ID NO: 2174 - protein, 14 aa, Artificial Sequence
  Description of Artificial Sequence: Synthetic peptide
  N-term Ac
  MOD_RES (4)..(4): Alpha-methyl-D-cysteine connected by an i to i+7, seven-methylene crosslinker to another thiol-containing amino acid
  misc_feature (4)..(11): Crosslink between residues
  MOD_RES (11)..(11): Alpha-methyl-L-cysteine connected by an i to i+7, seven-methylene crosslinker to another thiol-containing amino acid
  C-term NH2
LTFCAYWAQLCAVQ

SEQ ID NO: 2175 - protein, 14 aa, Artificial Sequence
  Description of Artificial Sequence: Synthetic peptide
  N-term Ac
  MOD_RES (4)..(4): Alpha-methyl-D-cysteine connected by an i to i+7, seven-methylene crosslinker to another thiol-containing amino acid
  misc_feature (4)..(11): Crosslink between residues
  MOD_RES (11)..(11): Alpha-methyl-L-cysteine connected by an i to i+7, seven-methylene crosslinker to another thiol-containing amino acid
  C-term NH2
LTFCAYWAQLCAVQ

SEQ ID NO: 2176 - protein, 14 aa, Artificial Sequence
  Description of Artificial Sequence: Synthetic peptide
  N-term Ac
  MOD_RES (4)..(4): Alpha-methyl-D-cysteine connected by an i to i+7, seven-methylene crosslinker to another thiol-containing amino acid
  misc_feature (4)..(11): Crosslink between residues
  MOD_RES (11)..(11): Alpha-methyl-L-cysteine connected by an i to i+7, seven-methylene crosslinker to another thiol-containing amino acid
  MOD_RES (14)..(14): D-amino acid
  C-term NH2
LTFCAYWAQLCSAA

SEQ ID NO: 2177 - protein, 14 aa, Artificial Sequence
  Description of Artificial Sequence: Synthetic peptide
  N-term Ac
  MOD_RES (4)..(4): Alpha-methyl-D-cysteine connected by an i to i+7, seven-methylene crosslinker to another thiol-containing amino acid
  misc_feature (4)..(11): Crosslink between residues
  MOD_RES (11)..(11): Alpha-methyl-L-cysteine connected by an i to i+7, seven-methylene crosslinker to another thiol-containing amino acid
  MOD_RES (14)..(14): D-amino acid
  C-term NH2
LTFCAYWAQLCSAA

SEQ ID NO: 2178 - protein, 14 aa, Artificial Sequence
  Description of Artificial Sequence: Synthetic peptide
  N-term Ac
  MOD_RES (4)..(4): Alpha-methyl-D-cysteine connected by an i to i+7, seven-methylene crosslinker to another thiol-containing amino acid
  misc_feature (4)..(11): Crosslink between residues
  MOD_RES (10)..(10): homo-Leu
  MOD_RES (11)..(11): Alpha-methyl-L-cysteine connected by an i to i+7, seven-methylene crosslinker to another thiol-containing amino acid
  C-term NH2
LTFCAYWAQLCSAA

SEQ ID NO: 2179 - protein, 14 aa, Artificial Sequence
  Description of Artificial Sequence: Synthetic peptide
  N-term Ac
  MOD_RES (4)..(4): Alpha-methyl-D-cysteine connected by an i to i+7, seven-methylene crosslinker to another thiol-containing amino acid
  misc_feature (4)..(11): Crosslink between residues
  MOD_RES (10)..(10): homo-Leu
  MOD_RES (11)..(11): Alpha-methyl-L-cysteine connected by an i to i+7, seven-methylene crosslinker to another thiol-containing amino acid
  C-term NH2
LTFCAYWAQLCSAA

SEQ ID NO: 2180 - protein, 14 aa, Artificial Sequence
  Description of Artificial Sequence: Synthetic peptide
  N-term Ac
  MOD_RES (4)..(4): Alpha-methyl-D-cysteine connected by an i to i+7, seven-methylene crosslinker to another thiol-containing amino acid
  misc_feature (4)..(11): Crosslink between residues
  MOD_RES (11)..(11): Amino acid comprising two pentenyl-alanine olefin side chains, each of which is crosslinked to another amino acid as indicated
  misc_feature (11)..(14): Crosslink between residues
  MOD_RES (14)..(14): Alpha-methyl-L-cysteine connected by an i to i+7, seven-methylene crosslinker to another thiol-containing amino acid
  C-term NH2
LTFCAYWEQLASAC

SEQ ID NO: 2181 - protein, 14 aa, Artificial Sequence
  Description of Artificial Sequence: Synthetic peptide
  N-term Ac
  MOD_RES (4)..(4): Alpha-methyl-D-cysteine connected by an i to i+7, seven-methylene crosslinker to another thiol-containing amino acid
  misc_feature (4)..(11): Crosslink between residues
  MOD_RES (11)..(11): Alpha-methyl-L-cysteine connected by an i to i+7, seven-methylene crosslinker to another thiol-containing amino acid
  C-term NH2
LTFCAYWAQLCSLA

SEQ ID NO: 2182 - protein, 14 aa, Artificial Sequence
  Description of Artificial Sequence: Synthetic peptide
  N-term Ac
  MOD_RES (4)..(4): Alpha-methyl-D-cysteine connected by an i to i+7, seven-methylene crosslinker to another thiol-containing amino acid
  misc_feature (4)..(11): Crosslink between residues
  MOD_RES (11)..(11): Alpha-methyl-L-cysteine connected by an i to i+7, seven-methylene crosslinker to another thiol-containing amino acid
  C-term NH2
LTFCAYWAQLCSLA

SEQ ID NO: 2183 - protein, 14 aa, Artificial Sequence
  Description of Artificial Sequence: Synthetic peptide
  N-term Ac
  MOD_RES (4)..(4): Alpha-methyl-D-cysteine connected by an i to i+7, seven-methylene crosslinker to another thiol-containing amino acid
  misc_feature (4)..(11): Crosslink between residues
  MOD_RES (11)..(11): Alpha-methyl-L-cysteine connected by an i to i+7, seven-methylene crosslinker to another thiol-containing amino acid
  C-term NH2
LTFCAYWAQLCSWA

SEQ ID NO: 2184 - protein, 14 aa, Artificial Sequence
  Description of Artificial Sequence: Synthetic peptide
  N-term Ac
  MOD_RES (4)..(4): Alpha-methyl-D-cysteine connected by an i to i+7, seven-methylene crosslinker to another thiol-containing amino acid
  misc_feature (4)..(11): Crosslink between residues
  MOD_RES (11)..(11): Alpha-methyl-L-cysteine connected by an i to i+7, seven-methylene crosslinker to another thiol-containing amino acid
  C-term NH2
LTFCAYWAQLCSWA

SEQ ID NO: 2185 - protein, 14 aa, Artificial Sequence
  Description of Artificial Sequence: Synthetic peptide
  N-term Ac
  MOD_RES (4)..(4): Alpha-methyl-D-cysteine connected by an i to i+7, seven-methylene crosslinker to another thiol-containing amino acid
  misc_feature (4)..(11): Crosslink between residues
  MOD_RES (11)..(11): Alpha-methyl-L-cysteine connected by an i to i+7, seven-methylene crosslinker to another thiol-containing amino acid
  C-term NH2
LTFCAYWAQLCSVS

SEQ ID NO: 2186 - protein, 14 aa, Artificial Sequence
  Description of Artificial Sequence: Synthetic peptide
  N-term Ac
  MOD_RES (4)..(4): Alpha-methyl-D-cysteine connected by an i to i+7, seven-methylene crosslinker to another thiol-containing amino acid
  misc_feature (4)..(11): Crosslink between residues
  MOD_RES (11)..(11): Alpha-methyl-L-cysteine connected by an i to i+7, seven-methylene crosslinker to another thiol-containing amino acid
  C-term NH2
LTFCAYWAQLCSAS

SEQ ID NO: 2187 - protein, 14 aa, Artificial Sequence
  Description of Artificial Sequence: Synthetic peptide
  N-term Ac
  MOD_RES (4)..(4): Alpha-methyl-D-cysteine connected by an i to i+7, seven-methylene crosslinker to another thiol-containing amino acid
  misc_feature (4)..(11): Crosslink between residues
  MOD_RES (11)..(11): Alpha-methyl-L-cysteine connected by an i to i+7, seven-methylene crosslinker to another thiol-containing amino acid
  C-term NH2
LTFCAYWAQLCSVG

SEQ ID NO: 2188 - protein, 14 aa, Artificial Sequence
  Description of Artificial Sequence: Synthetic peptide
  N-term Ac
  MOD_RES (4)..(4): Alpha-methyl-D-cysteine connected by an i to i+7, seven-methylene crosslinker to another thiol-containing amino acid
  misc_feature (4)..(11): Crosslink between residues
  MOD_RES (11)..(11): Alpha-methyl-L-cysteine connected by an i to i+7, seven-methylene crosslinker to another thiol-containing amino acid
  MOD_RES (14)..(14): D-amino acid
  C-term NH2
ETFCVYWAQLCSAA

SEQ ID NO: 2189 - protein, 14 aa, Artificial Sequence
  Description of Artificial Sequence: Synthetic peptide
  N-term Ac
  MOD_RES (4)..(4): Alpha-methyl-D-cysteine connected by an i to i+7, seven-methylene crosslinker to another thiol-containing amino acid
  misc_feature (4)..(11): Crosslink between residues
  MOD_RES (11)..(11): Alpha-methyl-L-cysteine connected by an i to i+7, seven-methylene crosslinker to another thiol-containing amino acid
  C-term NH2
ETFCVYWAQLCSAA

SEQ ID NO: 2190 - protein, 14 aa, Artificial Sequence
  Description of Artificial Sequence: Synthetic peptide
  N-term Ac
  MOD_RES (4)..(4): Alpha-methyl-D-cysteine connected by an i to i+7, seven-methylene crosslinker to another thiol-containing amino acid
  misc_feature (4)..(11): Crosslink between residues
  MOD_RES (11)..(11): Alpha-methyl-L-cysteine connected by an i to i+7, seven-methylene crosslinker to another thiol-containing amino acid
  C-term NH2
ETFCVYWAQLCSVA

SEQ ID NO: 2191 - protein, 14 aa, Artificial Sequence
  Description of Artificial Sequence: Synthetic peptide
  N-term Ac
  MOD_RES (4)..(4): Alpha-methyl-D-cysteine connected by an i to i+7, seven-methylene crosslinker to another thiol-containing amino acid
  misc_feature (4)..(11): Crosslink between residues
  MOD_RES (11)..(11): Alpha-methyl-L-cysteine connected by an i to i+7, seven-methylene crosslinker to another thiol-containing amino acid
  C-term NH2
ETFCVYWAQLCSLA

SEQ ID NO: 2192 - protein, 14 aa, Artificial Sequence
  Description of Artificial Sequence: Synthetic peptide
  N-term Ac
  MOD_RES (4)..(4): Alpha-methyl-D-cysteine connected by an i to i+7, seven-methylene crosslinker to another thiol-containing amino acid
  misc_feature (4)..(11): Crosslink between residues
  MOD_RES (11)..(11): Alpha-methyl-L-cysteine connected by an i to i+7, seven-methylene crosslinker to another thiol-containing amino acid
  C-term NH2
ETFCVYWAQLCSWA

SEQ ID NO: 2193 - protein, 14 aa, Artificial Sequence
  Description of Artificial Sequence: Synthetic peptide
  N-term Ac
  MOD_RES (4)..(4): Alpha-methyl-D-cysteine connected by an i to i+7, seven-methylene crosslinker to another thiol-containing amino acid
  misc_feature (4)..(11): Crosslink between residues
  MOD_RES (11)..(11): Alpha-methyl-L-cysteine connected by an i to i+7, seven-methylene crosslinker to another thiol-containing amino acid
  C-term NH2
ETFCKYWAQLCSWA

SEQ ID NO: 2194 - protein, 14 aa, Artificial Sequence
  Description of Artificial Sequence: Synthetic peptide
  N-term Ac
  MOD_RES (4)..(4): Alpha-methyl-D-cysteine connected by an i to i+7, seven-methylene crosslinker to another thiol-containing amino acid
  misc_feature (4)..(11): Crosslink between residues
  MOD_RES (11)..(11): Alpha-methyl-L-cysteine connected by an i to i+7, seven-methylene crosslinker to another thiol-containing amino acid
  C-term NH2
ETFCVYWAQLCSVS

SEQ ID NO: 2195 - protein, 14 aa, Artificial Sequence
  Description of Artificial Sequence: Synthetic peptide
  N-term Ac
  MOD_RES (4)..(4): Alpha-methyl-D-cysteine connected by an i to i+7, seven-methylene crosslinker to another thiol-containing amino acid
  misc_feature (4)..(11): Crosslink between residues
  MOD_RES (11)..(11): Alpha-methyl-L-cysteine connected by an i to i+7, seven-methylene crosslinker to another thiol-containing amino acid
  C-term NH2
ETFCVYWAQLCSAS

SEQ ID NO: 2196 - protein, 14 aa, Artificial Sequence
  Description of Artificial Sequence: Synthetic peptide
  N-term Ac
  MOD_RES (4)..(4): Alpha-methyl-D-cysteine connected by an i to i+7, seven-methylene crosslinker to another thiol-containing amino acid
  misc_feature (4)..(11): Crosslink between residues
  MOD_RES (11)..(11): Alpha-methyl-L-cysteine connected by an i to i+7, seven-methylene crosslinker to another thiol-containing amino acid
  C-term NH2
ETFCVYWAQLCSVG

SEQ ID NO: 2197 - protein, 14 aa, Artificial Sequence
  Description of Artificial Sequence: Synthetic peptide
  N-term Ac
  MOD_RES (4)..(4): Alpha-methyl-D-cysteine connected by an i to i+7, seven-methylene crosslinker to another thiol-containing amino acid
  misc_feature (4)..(11): Crosslink between residues
  MOD_RES (11)..(11): Alpha-methyl-L-cysteine connected by an i to i+7, seven-methylene crosslinker to another thiol-containing amino acid
  MOD_RES (14)..(14): D-amino acid
  C-term NH2
LTFCVYWAQLCSSA

SEQ ID NO: 2198 - protein, 14 aa, Artificial Sequence
  Description of Artificial Sequence: Synthetic peptide
  N-term Ac
  MOD_RES (4)..(4): Alpha-methyl-D-cysteine connected by an i to i+7, seven-methylene crosslinker to another thiol-containing amino acid
  misc_feature (4)..(11): Crosslink between residues
  MOD_RES (11)..(11): Alpha-methyl-L-cysteine connected by an i to i+7, seven-methylene crosslinker to another thiol-containing amino acid
  MOD_RES (14)..(14): D-amino acid
  C-term NH2
ETFCVYWAQLCSSA

SEQ ID NO: 2199 - protein, 14 aa, Artificial Sequence
  Description of Artificial Sequence: Synthetic peptide
  N-term Ac
  MOD_RES (4)..(4): Alpha-methyl-D-cysteine connected by an i to i+7, seven-methylene crosslinker to another thiol-containing amino acid
  misc_feature (4)..(11): Crosslink between residues
  MOD_RES (11)..(11): Alpha-methyl-L-cysteine connected by an i to i+7, seven-methylene crosslinker to another thiol-containing amino acid
  MOD_RES (14)..(14): D-amino acid
  C-term NH2
LTFCVYWAQLCSNA

SEQ ID NO: 2200 - protein, 14 aa, Artificial Sequence
  Description of Artificial Sequence: Synthetic peptide
  N-term Ac
  MOD_RES (4)..(4): Alpha-methyl-D-cysteine connected by an i to i+7, seven-methylene crosslinker to another thiol-containing amino acid
  misc_feature (4)..(11): Crosslink between residues
  MOD_RES (11)..(11): Alpha-methyl-L-cysteine connected by an i to i+7, seven-methylene crosslinker to another thiol-containing amino acid
  MOD_RES (14)..(14): D-amino acid
  C-term NH2
ETFCVYWAQLCSNA

SEQ ID NO: 2201 - protein, 14 aa, Artificial Sequence
  Description of Artificial Sequence: Synthetic peptide
  N-term Ac
  MOD_RES (4)..(4): Alpha-methyl-D-cysteine connected by an i to i+7, seven-methylene crosslinker to another thiol-containing amino acid
  misc_feature (4)..(11): Crosslink between residues
  MOD_RES (11)..(11): Alpha-methyl-L-cysteine connected by an i to i+7, seven-methylene crosslinker to another thiol-containing amino acid
  MOD_RES (14)..(14): D-amino acid
  C-term NH2
LTFCVYWAQLCSAA

SEQ ID NO: 2202 - protein, 14 aa, Artificial Sequence
  Description of Artificial Sequence: Synthetic peptide
  N-term Ac
  MOD_RES (4)..(4): Alpha-methyl-D-cysteine connected by an i to i+7, seven-methylene crosslinker to another thiol-containing amino acid
  misc_feature (4)..(11): Crosslink between residues
  MOD_RES (11)..(11): Alpha-methyl-L-cysteine connected by an i to i+7, seven-methylene crosslinker to another thiol-containing amino acid
  C-term NH2
LTFCVYWAQLCSVA

SEQ ID NO: 2203 - protein, 14 aa, Artificial Sequence
  Description of Artificial Sequence: Synthetic peptide
  N-term Ac
  MOD_RES (4)..(4): Alpha-methyl-D-cysteine connected by an i to i+7, seven-methylene crosslinker to another thiol-containing amino acid
  misc_feature (4)..(11): Crosslink between residues
  MOD_RES (11)..(11): Alpha-methyl-L-cysteine connected by an i to i+7, seven-methylene crosslinker to another thiol-containing amino acid
  C-term NH2
LTFCVYWAQLCSVA

SEQ ID NO: 2204 - protein, 14 aa, Artificial Sequence
  Description of Artificial Sequence: Synthetic peptide
  N-term Ac
  MOD_RES (4)..(4): Alpha-methyl-D-cysteine connected by an i to i+7, seven-methylene crosslinker to another thiol-containing amino acid
  misc_feature (4)..(11): Crosslink between residues
  MOD_RES (11)..(11): Alpha-methyl-L-cysteine connected by an i to i+7, seven-methylene crosslinker to another thiol-containing amino acid
  C-term NH2
LTFCVYWAQLCSWA

SEQ ID NO: 2205 - protein, 14 aa, Artificial Sequence
  Description of Artificial Sequence: Synthetic peptide
  N-term Ac
  MOD_RES (4)..(4): Alpha-methyl-D-cysteine connected by an i to i+7, seven-methylene crosslinker to another thiol-containing amino acid
  misc_feature (4)..(11): Crosslink between residues
  MOD_RES (11)..(11): Alpha-methyl-L-cysteine connected by an i to i+7, seven-methylene crosslinker to another thiol-containing amino acid
  C-term NH2
LTFCVYWAQLCSVS

SEQ ID NO: 2206 - protein, 14 aa, Artificial Sequence
  Description of Artificial Sequence: Synthetic peptide
  N-term Ac
  MOD_RES (4)..(4): Alpha-methyl-D-cysteine connected by an i to i+7, seven-methylene crosslinker to another thiol-containing amino acid
  misc_feature (4)..(11): Crosslink between residues
  MOD_RES (11)..(11): Alpha-methyl-L-cysteine connected by an i to i+7, seven-methylene crosslinker to another thiol-containing amino acid
  C-term NH2
LTFCVYWAQLCSVS

SEQ ID NO: 2207 - protein, 14 aa, Artificial Sequence
  Description of Artificial Sequence: Synthetic peptide
  N-term Ac
  MOD_RES (4)..(4): Alpha-methyl-D-cysteine connected by an i to i+7, seven-methylene crosslinker to another thiol-containing amino acid
  misc_feature (4)..(11): Crosslink between residues
  MOD_RES (11)..(11): Alpha-methyl-L-cysteine connected by an i to i+7, seven-methylene crosslinker to another thiol-containing amino acid
  C-term NH2
LTFCVYWAQLCSAS

SEQ ID NO: 2208 - protein, 14 aa, Artificial Sequence
  Description of Artificial Sequence: Synthetic peptide
  N-term Ac
  MOD_RES (4)..(4): Alpha-methyl-D-cysteine connected by an i to i+7, seven-methylene crosslinker to another thiol-containing amino acid
  misc_feature (4)..(11): Crosslink between residues
  MOD_RES (11)..(11): Alpha-methyl-L-cysteine connected by an i to i+7, seven-methylene crosslinker to another thiol-containing amino acid
  C-term NH2
LTFCVYWAQLCSAS

SEQ ID NO: 2209 - protein, 14 aa, Artificial Sequence
  Description of Artificial Sequence: Synthetic peptide
  N-term Ac
  MOD_RES (4)..(4): Alpha-methyl-D-cysteine connected by an i to i+7, seven-methylene crosslinker to another thiol-containing amino acid
  misc_feature (4)..(11): Crosslink between residues
  MOD_RES (11)..(11): Alpha-methyl-L-cysteine connected by an i to i+7, seven-methylene crosslinker to another thiol-containing amino acid
  C-term NH2
LTFCVYWAQLCSVG

SEQ ID NO: 2210 - protein, 14 aa, Artificial Sequence
  Description of Artificial Sequence: Synthetic peptide
  N-term Ac
  MOD_RES (4)..(4): Alpha-methyl-D-cysteine connected by an i to i+7, seven-methylene crosslinker to another thiol-containing amino acid
  misc_feature (4)..(11): Crosslink between residues
  MOD_RES (11)..(11): Alpha-methyl-L-cysteine connected by an i to i+7, seven-methylene crosslinker to another thiol-containing amino acid
  C-term NH2
LTFCVYWAQLCSVG

SEQ ID NO: 2211 - protein, 14 aa, Artificial Sequence
  Description of Artificial Sequence: Synthetic peptide
  N-term Ac
  MOD_RES (4)..(4): Alpha-methyl-D-cysteine connected by an i to i+7, seven-methylene crosslinker to another thiol-containing amino acid
  misc_feature (4)..(11): Crosslink between residues
  MOD_RES (10)..(10): Cyclohexyl-Ala
  MOD_RES (11)..(11): Alpha-methyl-L-cysteine connected by an i to i+7, seven-methylene crosslinker to another thiol-containing amino acid
  C-term NH2
LTFCEYWAQACSAA

SEQ ID NO: 2212 - protein, 14 aa, Artificial Sequence
  Description of Artificial Sequence: Synthetic peptide
  N-term Ac
  MOD_RES (4)..(4): Alpha-methyl-D-cysteine connected by an i to i+7, seven-methylene crosslinker to another thiol-containing amino acid
  misc_feature (4)..(11): Crosslink between residues
  MOD_RES (10)..(10): Cyclohexyl-Ala
  MOD_RES (11)..(11): Alpha-methyl-L-cysteine connected by an i to i+7, seven-methylene crosslinker to another thiol-containing amino acid
  C-term NH2
LTFCEYWAQACSAA

SEQ ID NO: 2213 - protein, 14 aa, Artificial Sequence
  Description of Artificial Sequence: Synthetic peptide
  N-term Ac
  MOD_RES (4)..(4): Alpha-methyl-D-cysteine connected by an i to i+7, seven-methylene crosslinker to another thiol-containing amino acid
  misc_feature (4)..(11): Crosslink between residues
  MOD_RES (10)..(10): Cyclopentyl-Gly
  MOD_RES (11)..(11): Alpha-methyl-L-cysteine connected by an i to i+7, seven-methylene crosslinker to another thiol-containing amino acid
  C-term NH2
LTFCEYWAQGCSAA

SEQ ID NO: 2214 - protein, 14 aa, Artificial Sequence
  Description of Artificial Sequence: Synthetic peptide
  N-term Ac
  MOD_RES (4)..(4): Alpha-methyl-D-cysteine connected by an i to i+7, seven-methylene crosslinker to another thiol-containing amino acid
  misc_feature (4)..(11): Crosslink between residues
  MOD_RES (10)..(10): Cyclopentyl-Gly
  MOD_RES (11)..(11): Alpha-methyl-L-cysteine connected by an i to i+7, seven-methylene crosslinker to another thiol-containing amino acid
  C-term NH2
LTFCEYWAQGCSAA

SEQ ID NO: 2215 - protein, 14 aa, Artificial Sequence
  Description of Artificial Sequence: Synthetic peptide
  N-term Ac
  MOD_RES (4)..(4): Alpha-methyl-D-cysteine connected by an i to i+7, seven-methylene crosslinker to another thiol-containing amino acid
  misc_feature (4)..(11): Crosslink between residues
  MOD_RES (11)..(11): Alpha-methyl-L-cysteine connected by an i to i+7, seven-methylene crosslinker to another thiol-containing amino acid
  C-term NH2
LTFCEYWAQFCSAA

SEQ ID NO: 2216 - protein, 14 aa, Artificial Sequence
  Description of Artificial Sequence: Synthetic peptide
  N-term Ac
  MOD_RES (4)..(4): Alpha-methyl-D-cysteine connected by an i to i+7, seven-methylene crosslinker to another thiol-containing amino acid
  misc_feature (4)..(11): Crosslink between residues
  MOD_RES (11)..(11): Alpha-methyl-L-cysteine connected by an i to i+7, seven-methylene crosslinker to another thiol-containing amino acid
  C-term NH2
LTFCEYWAQFCSAA

SEQ ID NO: 2217 - protein, 14 aa, Artificial Sequence
  Description of Artificial Sequence: Synthetic peptide
  N-term Ac
  MOD_RES (4)..(4): Alpha-methyl-D-cysteine connected by an i to i+7, seven-methylene crosslinker to another thiol-containing amino acid
  misc_feature (4)..(11): Crosslink between residues
  MOD_RES (10)..(10): Cyclobutyl-Ala
  MOD_RES (11)..(11): Alpha-methyl-L-cysteine connected by an i to i+7, seven-methylene crosslinker to another thiol-containing amino acid
  C-term NH2
LTFCEYWAQACSAA

SEQ ID NO: 2218 - protein, 14 aa, Artificial Sequence
  Description of Artificial Sequence: Synthetic peptide
  N-term Ac
  MOD_RES (4)..(4): Alpha-methyl-D-cysteine connected by an i to i+7, seven-methylene crosslinker to another thiol-containing amino acid
  misc_feature (4)..(11): Crosslink between residues
  MOD_RES (10)..(10): Cyclobutyl-Ala
  MOD_RES (11)..(11): Alpha-methyl-L-cysteine connected by an i to i+7, seven-methylene crosslinker to another thiol-containing amino acid
  C-term NH2
LTFCEYWAQACSAA

SEQ ID NO: 2219 - protein, 14 aa, Artificial Sequence
  Description of Artificial Sequence: Synthetic peptide
  N-term Ac
  MOD_RES (3)..(3): 3-chloro-Phe
  MOD_RES (4)..(4): Alpha-methyl-D-cysteine connected by an i to i+7, seven-methylene crosslinker to another thiol-containing amino acid
  misc_feature (4)..(11): Crosslink between residues
  MOD_RES (11)..(11): Alpha-methyl-L-cysteine connected by an i to i+7, seven-methylene crosslinker to another thiol-containing amino acid
  C-term NH2
LTFCEYWAQLCSAA

SEQ ID NO: 2220 - protein, 14 aa, Artificial Sequence
  Description of Artificial Sequence: Synthetic peptide
  N-term Ac
  MOD_RES (3)..(3): 3-chloro-Phe
  MOD_RES (4)..(4): Alpha-methyl-D-cysteine connected by an i to i+7, seven-methylene crosslinker to another thiol-containing amino acid
  misc_feature (4)..(11): Crosslink between residues
  MOD_RES (11)..(11): Alpha-methyl-L-cysteine connected by an i to i+7, seven-methylene crosslinker to another thiol-containing amino acid
  C-term NH2
LTFCEYWAQLCSAA

SEQ ID NO: 2221 - protein, 14 aa, Artificial Sequence
  Description of Artificial Sequence: Synthetic peptide
  N-term Ac
  MOD_RES (3)..(3): 3,4-difluoro-Phe
  MOD_RES (4)..(4): Alpha-methyl-D-cysteine connected by an i to i+7, seven-methylene crosslinker to another thiol-containing amino acid
  misc_feature (4)..(11): Crosslink between residues
  MOD_RES (11)..(11): Alpha-methyl-L-cysteine connected by an i to i+7, seven-methylene crosslinker to another thiol-containing amino acid
  C-term NH2
LTFCEYWAQLCSAA

SEQ ID NO: 2222 - protein, 14 aa, Artificial Sequence
  Description of Artificial Sequence: Synthetic peptide
  N-term Ac
  MOD_RES (3)..(3): 3,4-difluoro-Phe
  MOD_RES (4)..(4): Alpha-methyl-D-cysteine connected by an i to i+7, seven-methylene crosslinker to another thiol-containing amino acid
  misc_feature (4)..(11): Crosslink between residues
  MOD_RES (11)..(11): Alpha-methyl-L-cysteine connected by an i to i+7, seven-methylene crosslinker to another thiol-containing amino acid
  C-term NH2
LTFCEYWAQLCSAA

SEQ ID NO: 2223 - protein, 14 aa, Artificial Sequence
  Description of Artificial Sequence: Synthetic peptide
  N-term Ac
  MOD_RES (3)..(3): 3,4-difluoro-Phe
  MOD_RES (4)..(4): Alpha-methyl-D-cysteine connected by an i to i+7, seven-methylene crosslinker to another thiol-containing amino acid
  misc_feature (4)..(11): Crosslink between residues
  MOD_RES (10)..(10): homo-Leu
  MOD_RES (11)..(11): Alpha-methyl-L-cysteine connected by an i to i+7, seven-methylene crosslinker to another thiol-containing amino acid
  C-term NH2
LTFCEYWAQLCSAA

SEQ ID NO: 2224 - protein, 14 aa, Artificial Sequence
  Description of Artificial Sequence: Synthetic peptide
  N-term Ac
  MOD_RES (3)..(3): 3,4-difluoro-Phe
  MOD_RES (4)..(4): Alpha-methyl-D-cysteine connected by an i to i+7, seven-methylene crosslinker to another thiol-containing amino acid
  misc_feature (4)..(11): Crosslink between residues
  MOD_RES (10)..(10): homo-Leu
  MOD_RES (11)..(11): Alpha-methyl-L-cysteine connected by an i to i+7, seven-methylene crosslinker to another thiol-containing amino acid
  C-term NH2
LTFCEYWAQLCSAA

SEQ ID NO: 2225 - protein, 14 aa, Artificial Sequence
  Description of Artificial Sequence: Synthetic peptide
  N-term Ac
  MOD_RES (4)..(4): Alpha-methyl-D-cysteine connected by an i to i+7, seven-methylene crosslinker to another thiol-containing amino acid
  misc_feature (4)..(11): Crosslink between residues
  MOD_RES (11)..(11): Alpha-methyl-L-cysteine connected by an i to i+7, seven-methylene crosslinker to another thiol-containing amino acid
  C-term NH2
ETFCEYWAQLCSAA

SEQ ID NO: 2226 - protein, 14 aa, Artificial Sequence
  Description of Artificial Sequence: Synthetic peptide
  N-term Ac
  MOD_RES (4)..(4): Alpha-methyl-D-cysteine connected by an i to i+7, seven-methylene crosslinker to another thiol-containing amino acid
  misc_feature (4)..(11): Crosslink between residues
  MOD_RES (11)..(11): Alpha-methyl-L-cysteine connected by an i to i+7, seven-methylene crosslinker to another thiol-containing amino acid
  C-term NH2
LTFCAYWVQLCSAA

SEQ ID NO: 2227 - protein, 14 aa, Artificial Sequence
  Description of Artificial Sequence: Synthetic peptide
  N-term Ac
  MOD_RES (4)..(4): Alpha-methyl-D-cysteine connected by an i to i+7, seven-methylene crosslinker to another thiol-containing amino acid
  misc_feature (4)..(11): Crosslink between residues
  MOD_RES (11)..(11): Alpha-methyl-L-cysteine connected by an i to i+7, seven-methylene crosslinker to another thiol-containing amino acid
  C-term NH2
LTFCAHWAQLCSAA

SEQ ID NO: 2228 - protein, 14 aa, Artificial Sequence
  Description of Artificial Sequence: Synthetic peptide
  N-term Ac
  MOD_RES (4)..(4): Alpha-methyl-D-cysteine connected by an i to i+7, seven-methylene crosslinker to another thiol-containing amino acid
  misc_feature (4)..(11): Crosslink between residues
  MOD_RES (11)..(11): Alpha-methyl-L-cysteine connected by an i to i+7, seven-methylene crosslinker to another thiol-containing amino acid
  C-term NH2
LTFCAEWAQLCSAA

SEQ ID NO: 2229 - protein, 14 aa, Artificial Sequence
  Description of Artificial Sequence: Synthetic peptide
  N-term Ac
  MOD_RES (4)..(4): Alpha-methyl-D-cysteine connected by an i to i+7, seven-methylene crosslinker to another thiol-containing amino acid
  misc_feature (4)..(11): Crosslink between residues
  MOD_RES (11)..(11): Alpha-methyl-L-cysteine connected by an i to i+7, seven-methylene crosslinker to another thiol-containing amino acid
  C-term NH2
LTFCASWAQLCSAA

SEQ ID NO: 2230 - protein, 14 aa, Artificial Sequence
  Description of Artificial Sequence: Synthetic peptide
  N-term Ac
  MOD_RES (4)..(4): Alpha-methyl-D-cysteine connected by an i to i+7, seven-methylene crosslinker to another thiol-containing amino acid
  misc_feature (4)..(11): Crosslink between residues
  MOD_RES (11)..(11): Alpha-methyl-L-cysteine connected by an i to i+7, seven-methylene crosslinker to another thiol-containing amino acid
  C-term NH2
LTFCAEWAQLCSAA

SEQ ID NO: 2231 - protein, 14 aa, Artificial Sequence
  Description of Artificial Sequence: Synthetic peptide
  N-term Ac
  MOD_RES (4)..(4): Alpha-methyl-D-cysteine connected by an i to i+7, seven-methylene crosslinker to another thiol-containing amino acid
  misc_feature (4)..(11): Crosslink between residues
  MOD_RES (11)..(11): Alpha-methyl-L-cysteine connected by an i to i+7, seven-methylene crosslinker to another thiol-containing amino acid
  C-term NH2
LTFCASWAQLCSAA

SEQ ID NO: 2232 - protein, 14 aa, Artificial Sequence
  Description of Artificial Sequence: Synthetic peptide
  N-term Ac
  MOD_RES (4)..(4): Alpha-methyl-D-cysteine connected by an i to i+7, seven-methylene crosslinker to another thiol-containing amino acid
  misc_feature (4)..(11): Crosslink between residues
  MOD_RES (6)..(6): 4-carboxy-Phe
  MOD_RES (11)..(11): Alpha-methyl-L-cysteine connected by an i to i+7, seven-methylene crosslinker to another thiol-containing amino acid
  C-term NH2
LTFCAFWAQLCSAA

SEQ ID NO: 2233 - protein, 14 aa, Artificial Sequence
  Description of Artificial Sequence: Synthetic peptide
  N-term Ac
  MOD_RES (4)..(4): Alpha-methyl-D-cysteine connected by an i to i+7, seven-methylene crosslinker to another thiol-containing amino acid
  misc_feature (4)..(11): Crosslink between residues
  MOD_RES (6)..(6): 4-carboxy-Phe
  MOD_RES (11)..(11): Alpha-methyl-L-cysteine connected by an i to i+7, seven-methylene crosslinker to another thiol-containing amino acid
  C-term NH2
LTFCAFWAQLCSAA

SEQ ID NO: 2234 - protein, 15 aa, Artificial Sequence
  Description of Artificial Sequence: Synthetic peptide
  N-term Ac
  MOD_RES (4)..(4): Alpha-methyl-D-cysteine connected by an i to i+7, seven-methylene crosslinker to another thiol-containing amino acid
  misc_feature (4)..(11): Crosslink between residues
  MOD_RES (11)..(11): Alpha-methyl-L-cysteine connected by an i to i+7, seven-methylene crosslinker to another thiol-containing amino acid
  MOD_RES (15)..(15): D-amino acid
  C-term NH2
LTFCAHWAQLCAAIA

SEQ ID NO: 2235 - protein, 15 aa, Artificial Sequence
  Description of Artificial Sequence: Synthetic peptide
  N-term Ac
  MOD_RES (4)..(4): Alpha-methyl-D-cysteine connected by an i to i+7, seven-methylene crosslinker to another thiol-containing amino acid
  misc_feature (4)..(11): Crosslink between residues
  MOD_RES (11)..(11): Alpha-methyl-L-cysteine connected by an i to i+7, seven-methylene crosslinker to another thiol-containing amino acid
  MOD_RES (15)..(15): D-amino acid
  C-term NH2
ITFCFYWAQLCAAIA

SEQ ID NO: 2236 - protein, 15 aa, Artificial Sequence
  Description of Artificial Sequence: Synthetic peptide
  N-term Ac
  MOD_RES (4)..(4): Alpha-methyl-D-cysteine connected by an i to i+7, seven-methylene crosslinker to another thiol-containing amino acid
  misc_feature (4)..(11): Crosslink between residues
  MOD_RES (11)..(11): Alpha-methyl-L-cysteine connected by an i to i+7, seven-methylene crosslinker to another thiol-containing amino acid
  MOD_RES (15)..(15): D-amino acid
  C-term NH2
ITFCEHWAQLCAAIA

SEQ ID NO: 2237 - protein, 15 aa, Artificial Sequence
  Description of Artificial Sequence: Synthetic peptide
  N-term Ac
  MOD_RES (4)..(4): Alpha-methyl-D-cysteine connected by an i to i+7, seven-methylene crosslinker to another thiol-containing amino acid
  misc_feature (4)..(11): Crosslink between residues
  MOD_RES (11)..(11): Alpha-methyl-L-cysteine connected by an i to i+7, seven-methylene crosslinker to another thiol-containing amino acid
  MOD_RES (15)..(15): D-amino acid
  C-term NH2
ITFCEHWAQLCAAIA

SEQ ID NO: 2238 - protein, 15 aa, Artificial Sequence
  Description of Artificial Sequence: Synthetic peptide
  N-term Ac
  MOD_RES (4)..(4): Alpha-methyl-D-cysteine connected by an i to i+7, seven-methylene crosslinker to another thiol-containing amino acid
  misc_feature (4)..(11): Crosslink between residues
  MOD_RES (11)..(11): Alpha-methyl-L-cysteine connected by an i to i+7, seven-methylene crosslinker to another thiol-containing amino acid
  MOD_RES (15)..(15): D-amino acid
  C-term NH2
ETFCEHWAQLCAAIA

SEQ ID NO: 2239 - protein, 15 aa, Artificial Sequence
  Description of Artificial Sequence: Synthetic peptide
  N-term Ac
  MOD_RES (4)..(4): Alpha-methyl-D-cysteine connected by an i to i+7, seven-methylene crosslinker to another thiol-containing amino acid
  misc_feature (4)..(11): Crosslink between residues
  MOD_RES (11)..(11): Alpha-methyl-L-cysteine connected by an i to i+7, seven-methylene crosslinker to another thiol-containing amino acid
  MOD_RES (15)..(15): D-amino acid
  C-term NH2
ETFCEHWAQLCAAIA

SEQ ID NO: 2240 - protein, 15 aa, Artificial Sequence
  Description of Artificial Sequence: Synthetic peptide
  N-term Ac
  MOD_RES (4)..(4): Alpha-methyl-D-cysteine connected by an i to i+7, seven-methylene crosslinker to another thiol-containing amino acid
  misc_feature (4)..(11): Crosslink between residues
  MOD_RES (11)..(11): Alpha-methyl-L-cysteine connected by an i to i+7, seven-methylene crosslinker to another thiol-containing amino acid
  MOD_RES (15)..(15): D-amino acid
  C-term NH2
LTFCAHWVQLCAAIA

SEQ ID NO: 2241 - protein, 15 aa, Artificial Sequence
  Description of Artificial Sequence: Synthetic peptide
  N-term Ac
  MOD_RES (4)..(4): Alpha-methyl-D-cysteine connected by an i to i+7, seven-methylene crosslinker to another thiol-containing amino acid
  misc_feature (4)..(11): Crosslink between residues
  MOD_RES (11)..(11): Alpha-methyl-L-cysteine connected by an i to i+7, seven-methylene crosslinker to another thiol-containing amino acid
  MOD_RES (15)..(15): D-amino acid
  C-term NH2
ITFCFYWVQLCAAIA

SEQ ID NO: 2242 - protein, 15 aa, Artificial Sequence
  Description of Artificial Sequence: Synthetic peptide
  N-term Ac
  MOD_RES (4)..(4): Alpha-methyl-D-cysteine connected by an i to i+7, seven-methylene crosslinker to another thiol-containing amino acid
  misc_feature (4)..(11): Crosslink between residues
  MOD_RES (11)..(11): Alpha-methyl-L-cysteine connected by an i to i+7, seven-methylene crosslinker to another thiol-containing amino acid
  MOD_RES (15)..(15): D-amino acid
  C-term NH2
ITFCEYWVQLCAAIA

SEQ ID NO: 2243 - protein, 15 aa, Artificial Sequence
  Description of Artificial Sequence: Synthetic peptide
  N-term Ac
  MOD_RES (4)..(4): Alpha-methyl-D-cysteine connected by an i to i+7, seven-methylene crosslinker to another thiol-containing amino acid
  misc_feature (4)..(11): Crosslink between residues
  MOD_RES (11)..(11): Alpha-methyl-L-cysteine connected by an i to i+7, seven-methylene crosslinker to another thiol-containing amino acid
  MOD_RES (15)..(15): D-amino acid
  C-term NH2
ITFCEHWVQLCAAIA

SEQ ID NO: 2244 - protein, 15 aa, Artificial Sequence
  Description of Artificial Sequence: Synthetic peptide
  N-term Ac
  MOD_RES (4)..(4): Alpha-methyl-D-cysteine connected by an i to i+7, seven-methylene crosslinker to another thiol-containing amino acid
  misc_feature (4)..(11): Crosslink between residues
  MOD_RES (11)..(11): Alpha-methyl-L-cysteine connected by an i to i+7, seven-methylene crosslinker to another thiol-containing amino acid
  MOD_RES (15)..(15): D-amino acid
  C-term NH2
LTFCAEWAQLCAAIA

SEQ ID NO: 2245 - protein, 15 aa, Artificial Sequence
  Description of Artificial Sequence: Synthetic peptide
  N-term Ac
  MOD_RES (4)..(4): Alpha-methyl-D-cysteine connected by an i to i+7, seven-methylene crosslinker to another thiol-containing amino acid
  misc_feature (4)..(11): Crosslink between residues
  MOD_RES (6)..(6): 4-carboxy-Phe
  MOD_RES (11)..(11): Alpha-methyl-L-cysteine connected by an i to i+7, seven-methylene crosslinker to another thiol-containing amino acid
  MOD_RES (15)..(15): D-amino acid
  C-term NH2
LTFCAFWAQLCAAIA

SEQ ID NO: 2246 - protein, 15 aa, Artificial Sequence
  Description of Artificial Sequence: Synthetic peptide
  N-term Ac
  MOD_RES (4)..(4): Alpha-methyl-D-cysteine connected by an i to i+7, seven-methylene crosslinker to another thiol-containing amino acid
  misc_feature (4)..(11): Crosslink between residues
  MOD_RES (6)..(6): 4-carboxy-Phe
  MOD_RES (11)..(11): Alpha-methyl-L-cysteine connected by an i to i+7, seven-methylene crosslinker to another thiol-containing amino acid
  MOD_RES (15)..(15): D-amino acid
  C-term NH2
LTFCAFWAQLCAAIA

SEQ ID NO: 2247 - protein, 15 aa, Artificial Sequence
  Description of Artificial Sequence: Synthetic peptide
  N-term Ac
  MOD_RES (4)..(4): Alpha-methyl-D-cysteine connected by an i to i+7, seven-methylene crosslinker to another thiol-containing amino acid
  misc_feature (4)..(11): Crosslink between residues
  MOD_RES (11)..(11): Alpha-methyl-L-cysteine connected by an i to i+7, seven-methylene crosslinker to another thiol-containing amino acid
  C-term NH2
LTFCAHWAQLCAHFA

SEQ ID NO: 2248 - protein, 15 aa, Artificial Sequence
  Description of Artificial Sequence: Synthetic peptide
  N-term Ac
  MOD_RES (4)..(4): Alpha-methyl-D-cysteine connected by an i to i+7, seven-methylene crosslinker to another thiol-containing amino acid
  misc_feature (4)..(11): Crosslink between residues
  MOD_RES (11)..(11): Alpha-methyl-L-cysteine connected by an i to i+7, seven-methylene crosslinker to another thiol-containing amino acid
  C-term NH2
ITFCFYWAQLCAHFA

SEQ ID NO: 2249 - protein, 15 aa, Artificial Sequence
  Description of Artificial Sequence: Synthetic peptide
  N-term Ac
  MOD_RES (4)..(4): Alpha-methyl-D-cysteine connected by an i to i+7, seven-methylene crosslinker to another thiol-containing amino acid
  misc_feature (4)..(11): Crosslink between residues
  MOD_RES (11)..(11): Alpha-methyl-L-cysteine connected by an i to i+7, seven-methylene crosslinker to another thiol-containing amino acid
  C-term NH2
ITFCFYWAQLCAHFA

SEQ ID NO: 2250 - protein, 15 aa, Artificial Sequence
  Description of Artificial Sequence: Synthetic peptide
  N-term Ac
  MOD_RES (4)..(4): Alpha-methyl-D-cysteine connected by an i to i+7, seven-methylene crosslinker to another thiol-containing amino acid
  misc_feature (4)..(11): Crosslink between residues
  MOD_RES (11)..(11): Alpha-methyl-L-cysteine connected by an i to i+7, seven-methylene crosslinker to another thiol-containing amino acid
  C-term NH2
ITFCFHWAQLCAEFA

SEQ ID NO: 2251 - protein, 15 aa, Artificial Sequence
  Description of Artificial Sequence: Synthetic peptide
  N-term Ac
  MOD_RES (4)..(4): Alpha-methyl-D-cysteine connected by an i to i+7, seven-methylene crosslinker to another thiol-containing amino acid
  misc_feature (4)..(11): Crosslink between residues
  MOD_RES (11)..(11): Alpha-methyl-L-cysteine connected by an i to i+7, seven-methylene crosslinker to another thiol-containing amino acid
  C-term NH2
ITFCFHWAQLCAEFA

SEQ ID NO: 2252 - protein, 15 aa, Artificial Sequence
  Description of Artificial Sequence: Synthetic peptide
  N-term Ac
  MOD_RES (4)..(4): Alpha-methyl-D-cysteine connected by an i to i+7, seven-methylene crosslinker to another thiol-containing amino acid
  misc_feature (4)..(11): Crosslink between residues
  MOD_RES (11)..(11): Alpha-methyl-L-cysteine connected by an i to i+7, seven-methylene crosslinker to another thiol-containing amino acid
  C-term NH2
ITFCEHWAQLCAHFA

SEQ ID NO: 2253 - protein, 15 aa, Artificial Sequence
  Description of Artificial Sequence: Synthetic peptide
  N-term Ac
  MOD_RES (4)..(4): Alpha-methyl-D-cysteine connected by an i to i+7, seven-methylene crosslinker to another thiol-containing amino acid
  misc_feature (4)..(11): Crosslink between residues
  MOD_RES (11)..(11): Alpha-methyl-L-cysteine connected by an i to i+7, seven-methylene crosslinker to another thiol-containing amino acid
  C-term NH2
ITFCEHWAQLCAHFA

SEQ ID NO: 2254 - protein, 15 aa, Artificial Sequence
  Description of Artificial Sequence: Synthetic peptide
  N-term Ac
  MOD_RES (4)..(4): Alpha-methyl-D-cysteine connected by an i to i+7, seven-methylene crosslinker to another thiol-containing amino acid
  misc_feature (4)..(11): Crosslink between residues
  MOD_RES (11)..(11): Alpha-methyl-L-cysteine connected by an i to i+7, seven-methylene crosslinker to another thiol-containing amino acid
  C-term NH2
LTFCAHWVQLCAHFA

SEQ ID NO: 2255 - protein, 15 aa, Artificial Sequence
  Description of Artificial Sequence: Synthetic peptide
  N-term Ac
  MOD_RES (4)..(4): Alpha-methyl-D-cysteine connected by an i to i+7, seven-methylene crosslinker to another thiol-containing amino acid
  misc_feature (4)..(11): Crosslink between residues
  MOD_RES (11)..(11): Alpha-methyl-L-cysteine connected by an i to i+7, seven-methylene crosslinker to another thiol-containing amino acid
  C-term NH2
ITFCFYWVQLCAHFA

SEQ ID NO: 2256 - protein, 15 aa, Artificial Sequence
  Description of Artificial Sequence: Synthetic peptide
  N-term Ac
  MOD_RES (4)..(4): Alpha-methyl-D-cysteine connected by an i to i+7, seven-methylene crosslinker to another thiol-containing amino acid
  misc_feature (4)..(11): Crosslink between residues
  MOD_RES (11)..(11): Alpha-methyl-L-cysteine connected by an i to i+7, seven-methylene crosslinker to another thiol-containing amino acid
  C-term NH2
ITFCEYWVQLCAHFA

SEQ ID NO: 2257 - protein, 15 aa, Artificial Sequence
  Description of Artificial Sequence: Synthetic peptide
  N-term Ac
  MOD_RES (4)..(4): Alpha-methyl-D-cysteine connected by an i to i+7, seven-methylene crosslinker to another thiol-containing amino acid
  misc_feature (4)..(11): Crosslink between residues
  MOD_RES (11)..(11): Alpha-methyl-L-cysteine connected by an i to i+7, seven-methylene crosslinker to another thiol-containing amino acid
  C-term NH2
ITFCEHWVQLCAHFA

SEQ ID NO: 2258 - protein, 15 aa, Artificial Sequence
  Description of Artificial Sequence: Synthetic peptide
  N-term Ac
  MOD_RES (4)..(4): Alpha-methyl-D-cysteine connected by an i to i+7, seven-methylene crosslinker to another thiol-containing amino acid
  misc_feature (4)..(11): Crosslink between residues
  MOD_RES (11)..(11): Alpha-methyl-L-cysteine connected by an i to i+7, seven-methylene crosslinker to another thiol-containing amino acid
  C-term NH2
ITFCEHWVQLCAHFA

SEQ ID NO: 2259 - protein, 14 aa, Artificial Sequence
  Description of Artificial Sequence: Synthetic peptide
  N-term Ac
  MOD_RES (4)..(4): Alpha-methyl-D-cysteine connected by an i to i+7, seven-methylene crosslinker to another thiol-containing amino acid
  misc_feature (4)..(11): Crosslink between residues
  MOD_RES (11)..(11): Alpha-methyl-L-cysteine connected by an i to i+7, seven-methylene crosslinker to another thiol-containing amino acid
  C-term NH2
ETFCEYWAALCSAA

SEQ ID NO: 2260 - protein, 14 aa, Artificial Sequence
  Description of Artificial Sequence: Synthetic peptide
  N-term Ac
  MOD_RES (4)..(4): Alpha-methyl-D-cysteine connected by an i to i+7, seven-methylene crosslinker to another thiol-containing amino acid
  misc_feature (4)..(11): Crosslink between residues
  MOD_RES (11)..(11): Alpha-methyl-L-cysteine connected by an i to i+7, seven-methylene crosslinker to another thiol-containing amino acid
  C-term NH2
LTFCAYWVALCSAA

SEQ ID NO: 2261 - protein, 14 aa, Artificial Sequence
  Description of Artificial Sequence: Synthetic peptide
  N-term Ac
  MOD_RES (4)..(4): Alpha-methyl-D-cysteine connected by an i to i+7, seven-methylene crosslinker to another thiol-containing amino acid
  misc_feature (4)..(11): Crosslink between residues
  MOD_RES (11)..(11): Alpha-methyl-L-cysteine connected by an i to i+7, seven-methylene crosslinker to another thiol-containing amino acid
  C-term NH2
LTFCAHWAALCSAA

SEQ ID NO: 2262 - protein, 14 aa, Artificial Sequence
  Description of Artificial Sequence: Synthetic peptide
  N-term Ac
  MOD_RES (4)..(4): Alpha-methyl-D-cysteine connected by an i to i+7, seven-methylene crosslinker to another thiol-containing amino acid
  misc_feature (4)..(11): Crosslink between residues
  MOD_RES (11)..(11): Alpha-methyl-L-cysteine connected by an i to i+7, seven-methylene crosslinker to another thiol-containing amino acid
  C-term NH2
LTFCAEWAALCSAA

SEQ ID NO: 2263 - protein, 14 aa, Artificial Sequence
  Description of Artificial Sequence: Synthetic peptide
  N-term Ac
  MOD_RES (4)..(4): Alpha-methyl-D-cysteine connected by an i to i+7, seven-methylene crosslinker to another thiol-containing amino acid
  misc_feature (4)..(11): Crosslink between residues
  MOD_RES (11)..(11): Alpha-methyl-L-cysteine connected by an i to i+7, seven-methylene crosslinker to another thiol-containing amino acid
  C-term NH2
LTFCAEWAALCSAA

SEQ ID NO: 2264 - protein, 14 aa, Artificial Sequence
  Description of Artificial Sequence: Synthetic peptide
  N-term Ac
  MOD_RES (4)..(4): Alpha-methyl-D-cysteine connected by an i to i+7, seven-methylene crosslinker to another thiol-containing amino acid
  misc_feature (4)..(11): Crosslink between residues
  MOD_RES (11)..(11): Alpha-methyl-L-cysteine connected by an i to i+7, seven-methylene crosslinker to another thiol-containing amino acid
  C-term NH2
LTFCASWAALCSAA

SEQ ID NO: 2265 - protein, 14 aa, Artificial Sequence
  Description of Artificial Sequence: Synthetic peptide
  N-term Ac
  MOD_RES (4)..(4): Alpha-methyl-D-cysteine connected by an i to i+7, seven-methylene crosslinker to another thiol-containing amino acid
  misc_feature (4)..(11): Crosslink between residues
  MOD_RES (11)..(11): Alpha-methyl-L-cysteine connected by an i to i+7, seven-methylene crosslinker to another thiol-containing amino acid
  C-term NH2
LTFCASWAALCSAA

SEQ ID NO: 2266 - protein, 15 aa, Artificial Sequence
  Description of Artificial Sequence: Synthetic peptide
  N-term Ac
  MOD_RES (4)..(4): Alpha-methyl-D-cysteine connected by an i to i+7, seven-methylene crosslinker to another thiol-containing amino acid
  misc_feature (4)..(11): Crosslink between residues
  MOD_RES (11)..(11): Alpha-methyl-L-cysteine connected by an i to i+7, seven-methylene crosslinker to another thiol-containing amino acid
  MOD_RES (15)..(15): D-amino acid
  C-term NH2
LTFCAYWAALCAAIA

SEQ ID NO: 2267 - protein, 15 aa, Artificial Sequence
  Description of Artificial Sequence: Synthetic peptide
  N-term Ac
  MOD_RES (4)..(4): Alpha-methyl-D-cysteine connected by an i to i+7, seven-methylene crosslinker to another thiol-containing amino acid
  misc_feature (4)..(11): Crosslink between residues
  MOD_RES (11)..(11): Alpha-methyl-L-cysteine connected by an i to i+7, seven-methylene crosslinker to another thiol-containing amino acid
  MOD_RES (15)..(15): D-amino acid
  C-term NH2
LTFCAYWAALCAAIA

SEQ ID NO: 2268 - protein, 15 aa, Artificial Sequence
  Description of Artificial Sequence: Synthetic peptide
  N-term Ac
  MOD_RES (4)..(4): Alpha-methyl-D-cysteine connected by an i to i+7, seven-methylene crosslinker to another thiol-containing amino acid
  misc_feature (4)..(11): Crosslink between residues
  MOD_RES (11)..(11): Alpha-methyl-L-cysteine connected by an i to i+7, seven-methylene crosslinker to another thiol-containing amino acid
  C-term NH2
LTFCAYWAALCAHFA

SEQ ID NO: 2269 - protein, 15 aa, Artificial Sequence
  Description of Artificial Sequence: Synthetic peptide
  N-term Ac
  MOD_RES (4)..(4): Alpha-methyl-D-cysteine connected by an i to i+7, seven-methylene crosslinker to another thiol-containing amino acid
  misc_feature (4)..(11): Crosslink between residues
  MOD_RES (11)..(11): Alpha-methyl-L-cysteine connected by an i to i+7, seven-methylene crosslinker to another thiol-containing amino acid
  MOD_RES (15)..(15): D-amino acid
  C-term NH2
LTFCEHWAQLCAHIA

SEQ ID NO: 2270 - protein, 15 aa, Artificial Sequence
  Description of Artificial Sequence: Synthetic peptide
  N-term Ac
  MOD_RES (4)..(4): Alpha-methyl-D-cysteine connected by an i to i+7, seven-methylene crosslinker to another thiol-containing amino acid
  misc_feature (4)..(11): Crosslink between residues
  MOD_RES (11)..(11): Alpha-methyl-L-cysteine connected by an i to i+7, seven-methylene crosslinker to another thiol-containing amino acid
  MOD_RES (15)..(15): D-amino acid
  C-term NH2
LTFCEHWAQLCAHIA

SEQ ID NO: 2271 - protein, 15 aa, Artificial Sequence
  Description of Artificial Sequence: Synthetic peptide
  N-term Ac
  MOD_RES (4)..(4): Alpha-methyl-D-cysteine connected by an i to i+7, seven-methylene crosslinker to another thiol-containing amino acid
  misc_feature (4)..(11): Crosslink between residues
  MOD_RES (11)..(11): Alpha-methyl-L-cysteine connected by an i to i+7, seven-methylene crosslinker to another thiol-containing amino acid
  MOD_RES (15)..(15): D-amino acid
  C-term NH2
LTFCAHWAQLCAHIA

SEQ ID NO: 2272 - protein, 15 aa, Artificial Sequence
  Description of Artificial Sequence: Synthetic peptide
  N-term Ac
  MOD_RES (4)..(4): Alpha-methyl-D-cysteine connected by an i to i+7, seven-methylene crosslinker to another thiol-containing amino acid
  misc_feature (4)..(11): Crosslink between residues
  MOD_RES (11)..(11): Alpha-methyl-L-cysteine connected by an i to i+7, seven-methylene crosslinker to another thiol-containing amino acid
  MOD_RES (15)..(15): D-amino acid
  C-term NH2
LTFCEYWAQLCAHIA

SEQ ID NO: 2273 - protein, 15 aa, Artificial Sequence
  Description of Artificial Sequence: Synthetic peptide
  N-term Ac
  MOD_RES (4)..(4): Alpha-methyl-D-cysteine connected by an i to i+7, seven-methylene crosslinker to another thiol-containing amino acid
  misc_feature (4)..(11): Crosslink between residues
  MOD_RES (11)..(11): Alpha-methyl-L-cysteine connected by an i to i+7, seven-methylene crosslinker to another thiol-containing amino acid
  MOD_RES (15)..(15): D-amino acid
  C-term NH2
LTFCAYWAQLCAAFA

SEQ ID NO: 2274 - protein, 15 aa, Artificial Sequence
  Description of Artificial Sequence: Synthetic peptide
  N-term Ac
  MOD_RES (4)..(4): Alpha-methyl-D-cysteine connected by an i to i+7, seven-methylene crosslinker to another thiol-containing amino acid
  misc_feature (4)..(11): Crosslink between residues
  MOD_RES (11)..(11): Alpha-methyl-L-cysteine connected by an i to i+7, seven-methylene crosslinker to another thiol-containing amino acid
  MOD_RES (15)..(15): D-amino acid
  C-term NH2
LTFCAYWAQLCAAFA

SEQ ID NO: 2275 - protein, 15 aa, Artificial Sequence
  Description of Artificial Sequence: Synthetic peptide
  N-term Ac
  MOD_RES (4)..(4): Alpha-methyl-D-cysteine connected by an i to i+7, seven-methylene crosslinker to another thiol-containing amino acid
  misc_feature (4)..(11): Crosslink between residues
  MOD_RES (11)..(11): Alpha-methyl-L-cysteine connected by an i to i+7, seven-methylene crosslinker to another thiol-containing amino acid
  MOD_RES (15)..(15): D-amino acid
  C-term NH2
LTFCAYWAQLCAAWA

SEQ ID NO: 2276 - protein, 15 aa, Artificial Sequence
  Description of Artificial Sequence: Synthetic peptide
  N-term Ac
  MOD_RES (4)..(4): Alpha-methyl-D-cysteine connected by an i to i+7, seven-methylene crosslinker to another thiol-containing amino acid
  misc_feature (4)..(11): Crosslink between residues
  MOD_RES (11)..(11): Alpha-methyl-L-cysteine connected by an i to i+7, seven-methylene crosslinker to another thiol-containing amino acid
  MOD_RES (15)..(15): D-amino acid
  C-term NH2
LTFCAYWAQLCAAVA

SEQ ID NO: 2277 - protein, 15 aa, Artificial Sequence
  Description of Artificial Sequence: Synthetic peptide
  N-term Ac
  MOD_RES (4)..(4): Alpha-methyl-D-cysteine connected by an i to i+7, seven-methylene crosslinker to another thiol-containing amino acid
  misc_feature (4)..(11): Crosslink between residues
  MOD_RES (11)..(11): Alpha-methyl-L-cysteine connected by an i to i+7, seven-methylene crosslinker to another thiol-containing amino acid
  MOD_RES (15)..(15): D-amino acid
  C-term NH2
LTFCAYWAQLCAAVA

SEQ ID NO: 2278 - protein, 15 aa, Artificial Sequence
  Description of Artificial Sequence: Synthetic peptide
  N-term Ac
  MOD_RES (4)..(4): Alpha-methyl-D-cysteine connected by an i to i+7, seven-methylene crosslinker to another thiol-containing amino acid
  misc_feature (4)..(11): Crosslink between residues
  MOD_RES (11)..(11): Alpha-methyl-L-cysteine connected by an i to i+7, seven-methylene crosslinker to another thiol-containing amino acid
  MOD_RES (15)..(15): D-amino acid
  C-term NH2
LTFCAYWAQLCAALA

SEQ ID NO: 2279 - protein, 15 aa, Artificial Sequence
  Description of Artificial Sequence: Synthetic peptide
  N-term Ac
  MOD_RES (4)..(4): Alpha-methyl-D-cysteine connected by an i to i+7, seven-methylene crosslinker to another thiol-containing amino acid
  misc_feature (4)..(11): Crosslink between residues
  MOD_RES (11)..(11): Alpha-methyl-L-cysteine connected by an i to i+7, seven-methylene crosslinker to another thiol-containing amino acid
  MOD_RES (15)..(15): D-amino acid
  C-term NH2
LTFCAYWAQLCAALA

SEQ ID NO: 2280 - protein, 15 aa, Artificial Sequence
  Description of Artificial Sequence: Synthetic peptide
  N-term Ac
  MOD_RES (4)..(4): Alpha-methyl-D-cysteine connected by an i to i+7, seven-methylene crosslinker to another thiol-containing amino acid
  misc_feature (4)..(11): Crosslink between residues
  MOD_RES (11)..(11): Alpha-methyl-L-cysteine connected by an i to i+7, seven-methylene crosslinker to another thiol-containing amino acid
  MOD_RES (15)..(15): D-amino acid
  C-term NH2
LTFCEYWAQLCAAIA

SEQ ID NO: 2281 - protein, 15 aa, Artificial Sequence
  Description of Artificial Sequence: Synthetic peptide
  N-term Ac
  MOD_RES (4)..(4): Alpha-methyl-D-cysteine connected by an i to i+7, seven-methylene crosslinker to another thiol-containing amino acid
  misc_feature (4)..(11): Crosslink between residues
  MOD_RES (11)..(11): Alpha-methyl-L-cysteine connected by an i to i+7, seven-methylene crosslinker to another thiol-containing amino acid
  MOD_RES (15)..(15): D-amino acid
  C-term NH2
LTFCEYWAQLCAAIA

SEQ ID NO: 2282 - protein, 15 aa, Artificial Sequence
  Description of Artificial Sequence: Synthetic peptide
  N-term Ac
  MOD_RES (4)..(4): Alpha-methyl-D-cysteine connected by an i to i+7, seven-methylene crosslinker to another thiol-containing amino acid
  misc_feature (4)..(11): Crosslink between residues
  MOD_RES (11)..(11): Alpha-methyl-L-cysteine connected by an i to i+7, seven-methylene crosslinker to another thiol-containing amino acid
  MOD_RES (15)..(15): D-amino acid
  C-term NH2
LTFCEYWAQLCAAFA

SEQ ID NO: 2283 - protein, 15 aa, Artificial Sequence
  Description of Artificial Sequence: Synthetic peptide
  N-term Ac
  MOD_RES (4)..(4): Alpha-methyl-D-cysteine connected by an i to i+7, seven-methylene crosslinker to another thiol-containing amino acid
  misc_feature (4)..(11): Crosslink between residues
  MOD_RES (11)..(11): Alpha-methyl-L-cysteine connected by an i to i+7, seven-methylene crosslinker to another thiol-containing amino acid
  MOD_RES (15)..(15): D-amino acid
  C-term NH2
LTFCEYWAQLCAAFA

SEQ ID NO: 2284 - protein, 15 aa, Artificial Sequence
  Description of Artificial Sequence: Synthetic peptide
  N-term Ac
  MOD_RES (4)..(4): Alpha-methyl-D-cysteine connected by an i to i+7, seven-methylene crosslinker to another thiol-containing amino acid
  misc_feature (4)..(11): Crosslink between residues
  MOD_RES (11)..(11): Alpha-methyl-L-cysteine connected by an i to i+7, seven-methylene crosslinker to another thiol-containing amino acid
  MOD_RES (15)..(15): D-amino acid
  C-term NH2
LTFCEYWAQLCAAVA

SEQ ID NO: 2285 - protein, 15 aa, Artificial Sequence
  Description of Artificial Sequence: Synthetic peptide
  N-term Ac
  MOD_RES (4)..(4): Alpha-methyl-D-cysteine connected by an i to i+7, seven-methylene crosslinker to another thiol-containing amino acid
  misc_feature (4)..(11): Crosslink between residues
  MOD_RES (11)..(11): Alpha-methyl-L-cysteine connected by an i to i+7, seven-methylene crosslinker to another thiol-containing amino acid
  MOD_RES (15)..(15): D-amino acid
  C-term NH2
LTFCEYWAQLCAAVA

SEQ ID NO: 2286 - protein, 15 aa, Artificial Sequence
  Description of Artificial Sequence: Synthetic peptide
  N-term Ac
  MOD_RES (4)..(4): Alpha-methyl-D-cysteine connected by an i to i+7, seven-methylene crosslinker to another thiol-containing amino acid
  misc_feature (4)..(11): Crosslink between residues
  MOD_RES (11)..(11): Alpha-methyl-L-cysteine connected by an i to i+7, seven-methylene crosslinker to another thiol-containing amino acid
  MOD_RES (15)..(15): D-amino acid
  C-term NH2
LTFCEHWAQLCAAIA

SEQ ID NO: 2287 - protein, 15 aa, Artificial Sequence
  Description of Artificial Sequence: Synthetic peptide
  N-term Ac
  MOD_RES (4)..(4): Alpha-methyl-D-cysteine connected by an i to i+7, seven-methylene crosslinker to another thiol-containing amino acid
  misc_feature (4)..(11): Crosslink between residues
  MOD_RES (11)..(11): Alpha-methyl-L-cysteine connected by an i to i+7, seven-methylene crosslinker to another thiol-containing amino acid
  MOD_RES (15)..(15): D-amino acid
  C-term NH2
LTFCEHWAQLCAAIA

SEQ ID NO: 2288 - protein, 15 aa, Artificial Sequence
  Description of Artificial Sequence: Synthetic peptide
  N-term Ac
  MOD_RES (4)..(4): Alpha-methyl-D-cysteine connected by an i to i+7, seven-methylene crosslinker to another thiol-containing amino acid
  misc_feature (4)..(11): Crosslink between residues
  MOD_RES (11)..(11): Alpha-methyl-L-cysteine connected by an i to i+7, seven-methylene crosslinker to another thiol-containing amino acid
  MOD_RES (15)..(15): D-amino acid
  C-term NH2
LTFCEHWAQLCAAWA

SEQ ID NO: 2289 - protein, 15 aa, Artificial Sequence
  Description of Artificial Sequence: Synthetic peptide
  N-term Ac
  MOD_RES (4)..(4): Alpha-methyl-D-cysteine connected by an i to i+7, seven-methylene crosslinker to another thiol-containing amino acid
  misc_feature (4)..(11): Crosslink between residues
  MOD_RES (11)..(11): Alpha-methyl-L-cysteine connected by an i to i+7, seven-methylene crosslinker to another thiol-containing amino acid
  MOD_RES (15)..(15): D-amino acid
  C-term NH2
LTFCEHWAQLCAAWA

SEQ ID NO: 2290 - protein, 15 aa, Artificial Sequence
  Description of Artificial Sequence: Synthetic peptide
  N-term Ac
  MOD_RES (4)..(4): Alpha-methyl-D-cysteine connected by an i to i+7, seven-methylene crosslinker to another thiol-containing amino acid
  misc_feature (4)..(11): Crosslink between residues
  MOD_RES (11)..(11): Alpha-methyl-L-cysteine connected by an i to i+7, seven-methylene crosslinker to another thiol-containing amino acid
  MOD_RES (15)..(15): D-amino acid
  C-term NH2
LTFCEHWAQLCAALA

SEQ ID NO: 2291 - protein, 15 aa, Artificial Sequence
  Description of Artificial Sequence: Synthetic peptide
  N-term Ac
  MOD_RES (4)..(4): Alpha-methyl-D-cysteine connected by an i to i+7, seven-methylene crosslinker to another thiol-containing amino acid
  misc_feature (4)..(11): Crosslink between residues
  MOD_RES (11)..(11): Alpha-methyl-L-cysteine connected by an i to i+7, seven-methylene crosslinker to another thiol-containing amino acid
  MOD_RES (15)..(15): D-amino acid
  C-term NH2
LTFCEHWAQLCAALA

SEQ ID NO: 2292 - protein, 15 aa, Artificial Sequence
  Description of Artificial Sequence: Synthetic peptide
  N-term Ac
  MOD_RES (4)..(4): Alpha-methyl-D-cysteine connected by an i to i+7, seven-methylene crosslinker to another thiol-containing amino acid
  misc_feature (4)..(11): Crosslink between residues
  MOD_RES (11)..(11): Alpha-methyl-L-cysteine connected by an i to i+7, seven-methylene crosslinker to another thiol-containing amino acid
  MOD_RES (15)..(15): D-amino acid
  C-term NH2
ETFCEHWVQLCAALA

SEQ ID NO: 2293 - protein, 15 aa, Artificial Sequence
  Description of Artificial Sequence: Synthetic peptide
  N-term Ac
  MOD_RES (4)..(4): Alpha-methyl-D-cysteine connected by an i to i+7, seven-methylene crosslinker to another thiol-containing amino acid
  misc_feature (4)..(11): Crosslink between residues
  MOD_RES (11)..(11): Alpha-methyl-L-cysteine connected by an i to i+7, seven-methylene crosslinker to another thiol-containing amino acid
  MOD_RES (15)..(15): D-amino acid
  C-term NH2
LTFCAYWAQLCAAAA

SEQ ID NO: 2294 - protein, 15 aa, Artificial Sequence
  Description of Artificial Sequence: Synthetic peptide
  N-term Ac
  MOD_RES (4)..(4): Alpha-methyl-D-cysteine connected by an i to i+7, seven-methylene crosslinker to another thiol-containing amino acid
  misc_feature (4)..(11): Crosslink between residues
  MOD_RES (11)..(11): Alpha-methyl-L-cysteine connected by an i to i+7, seven-methylene crosslinker to another thiol-containing amino acid
  MOD_RES (15)..(15): D-amino acid
  C-term NH2
LTFCAYWAQLCAAAA

SEQ ID NO: 2295 - protein, 15 aa, Artificial Sequence
  Description of Artificial Sequence: Synthetic peptide
  N-term Ac
  MOD_RES (4)..(4): Alpha-methyl-D-cysteine connected by an i to i+7, seven-methylene crosslinker to another thiol-containing amino acid
  misc_feature (4)..(11): Crosslink between residues
  MOD_RES (11)..(11): Alpha-methyl-L-cysteine connected by an i to i+7, seven-methylene crosslinker to another thiol-containing amino acid
  MOD_RES (14)..(14): 2-aminoisobutyric acid
  C-term NH2
LTFCAYWAQLCAAXA

SEQ ID NO: 2296 - protein, 15 aa, Artificial Sequence
  Description of Artificial Sequence: Synthetic peptide
  N-term Ac
  MOD_RES (4)..(4): Alpha-methyl-D-cysteine connected by an i to i+7, seven-methylene crosslinker to another thiol-containing amino acid
  misc_feature (4)..(11): Crosslink between residues
  MOD_RES (11)..(11): Alpha-methyl-L-cysteine connected by an i to i+7, seven-methylene crosslinker to another thiol-containing amino acid
  MOD_RES (14)..(14): 2-aminoisobutyric acid
  C-term NH2
LTFCAYWAQLCAAXA

SEQ ID NO: 2297 - protein, 16 aa, Artificial Sequence
  Description of Artificial Sequence: Synthetic peptide
  N-term Ac
  MOD_RES (4)..(4): Alpha-methyl-D-cysteine connected by an i to i+7, seven-methylene crosslinker to another thiol-containing amino acid
  misc_feature (4)..(11): Crosslink between residues
  MOD_RES (11)..(11): Alpha-methyl-L-cysteine connected by an i to i+7, seven-methylene crosslinker to another thiol-containing amino acid
  MOD_RES (16)..(16): D-amino acid
  C-term NH2
LTFCAYWAQLCAAAAA

SEQ ID NO: 2298 - protein, 15 aa, Artificial Sequence
  Description of Artificial Sequence: Synthetic peptide
  N-term Ac
  MOD_RES (4)..(4): Alpha-methyl-L-cysteine connected by an i to i+7, seven-methylene crosslinker to another thiol-containing amino acidr5
  misc_feature (4)..(11): Crosslink between residues
  MOD_RES (11)..(11): Alpha-methyl-L-cysteine connected by an i to i+7, seven-methylene crosslinker to another thiol-containing amino acids8
  MOD_RES (15)..(15): D-amino acid
  C-term NH2
LTFCAYWAQLCAAIA

SEQ ID NO: 2299 - protein, 14 aa, Artificial Sequence
  Description of Artificial Sequence: Synthetic peptide
  N-term Ac
  MOD_RES (4)..(4): Alpha-methyl-L-cysteine connected by an i to i+7, seven-methylene crosslinker to another thiol-containing amino acidr5
  misc_feature (4)..(11): Crosslink between residues
  MOD_RES (11)..(11): Alpha-methyl-L-cysteine connected by an i to i+7, seven-methylene crosslinker to another thiol-containing amino acids8
  C-term NH2
LTFCAYWAQLCSAA

SEQ ID NO: 2300 - protein, 15 aa, Artificial Sequence
  Description of Artificial Sequence: Synthetic peptide
  N-term Ac
  MOD_RES (4)..(4): Alpha-methyl-D-cysteine connected by an i to i+7, seven-methylene crosslinker to another thiol-containing amino acid
  misc_feature (4)..(11): Crosslink between residues
  MOD_RES (10)..(10): Cyclobutyl-Ala
  MOD_RES (11)..(11): Alpha-methyl-L-cysteine connected by an i to i+7, seven-methylene crosslinker to another thiol-containing amino acid
  MOD_RES (14)..(14): Norleucine
  C-term NH2
LTFCAYWAQACAALA

SEQ ID NO: 2301 - protein, 15 aa, Artificial Sequence
  Description of Artificial Sequence: Synthetic peptide
  N-term Ac
  MOD_RES (4)..(4): Alpha-methyl-D-cysteine connected by an i to i+7, seven-methylene crosslinker to another thiol-containing amino acid
  misc_feature (4)..(11): Crosslink between residues
  MOD_RES (10)..(10): Cyclobutyl-Ala
  MOD_RES (11)..(11): Alpha-methyl-L-cysteine connected by an i to i+7, seven-methylene crosslinker to another thiol-containing amino acid
  MOD_RES (14)..(14): Norleucine
  C-term NH2
ETFCAYWAQACAALA

SEQ ID NO: 2302 - protein, 15 aa, Artificial Sequence
  Description of Artificial Sequence: Synthetic peptide
  N-term Ac
  MOD_RES (4)..(4): Alpha-methyl-D-cysteine connected by an i to i+7, seven-methylene crosslinker to another thiol-containing amino acid
  misc_feature (4)..(11): Crosslink between residues
  MOD_RES (10)..(10): Cyclobutyl-Ala
  MOD_RES (11)..(11): Alpha-methyl-L-cysteine connected by an i to i+7, seven-methylene crosslinker to another thiol-containing amino acid
  MOD_RES (14)..(14): Norleucine
  C-term NH2
LTFCEYWAQACAALA

SEQ ID NO: 2303 - protein, 15 aa, Artificial Sequence
  Description of Artificial Sequence: Synthetic peptide
  N-term Ac
  MOD_RES (4)..(4): Alpha-methyl-D-cysteine connected by an i to i+7, seven-methylene crosslinker to another thiol-containing amino acid
  misc_feature (4)..(11): Crosslink between residues
  MOD_RES (10)..(10): Cyclobutyl-Ala
  MOD_RES (11)..(11): Alpha-methyl-L-cysteine connected by an i to i+7, seven-methylene crosslinker to another thiol-containing amino acid
  MOD_RES (14)..(14): Norleucine
  C-term NH2
LTFCAYWAQACAWLA

SEQ ID NO: 2304 - protein, 15 aa, Artificial Sequence
  Description of Artificial Sequence: Synthetic peptide
  N-term Ac
  MOD_RES (4)..(4): Alpha-methyl-D-cysteine connected by an i to i+7, seven-methylene crosslinker to another thiol-containing amino acid
  misc_feature (4)..(11): Crosslink between residues
  MOD_RES (10)..(10): Cyclobutyl-Ala
  MOD_RES (11)..(11): Alpha-methyl-L-cysteine connected by an i to i+7, seven-methylene crosslinker to another thiol-containing amino acid
  MOD_RES (14)..(14): Norleucine
  C-term NH2
ETFCAYWAQACAWLA

SEQ ID NO: 2305 - protein, 15 aa, Artificial Sequence
  Description of Artificial Sequence: Synthetic peptide
  N-term Ac
  MOD_RES (4)..(4): Alpha-methyl-D-cysteine connected by an i to i+7, seven-methylene crosslinker to another thiol-containing amino acid
  misc_feature (4)..(11): Crosslink between residues
  MOD_RES (10)..(10): Cyclobutyl-Ala
  MOD_RES (11)..(11): Alpha-methyl-L-cysteine connected by an i to i+7, seven-methylene crosslinker to another thiol-containing amino acid
  MOD_RES (14)..(14): Norleucine
  C-term NH2
LTFCEYWAQACAWLA

SEQ ID NO: 2306 - protein, 15 aa, Artificial Sequence
  Description of Artificial Sequence: Synthetic peptide
  N-term Ac
  MOD_RES (4)..(4): Alpha-methyl-D-cysteine connected by an i to i+7, seven-methylene crosslinker to another thiol-containing amino acid
  misc_feature (4)..(11): Crosslink between residues
  MOD_RES (10)..(10): Cyclobutyl-Ala
  MOD_RES (11)..(11): Alpha-methyl-L-cysteine connected by an i to i+7, seven-methylene crosslinker to another thiol-containing amino acid
  C-term NH2
LTFCEYWAQACSAFA

SEQ ID NO: 2307 - protein, 15 aa, Artificial Sequence
  Description of Artificial Sequence: Synthetic peptide
  N-term Ac
  MOD_RES (3)..(3): 3,4-difluoro-Phe
  MOD_RES (4)..(4): Alpha-methyl-D-cysteine connected by an i to i+7, seven-methylene crosslinker to another thiol-containing amino acid
  misc_feature (4)..(11): Crosslink between residues
  MOD_RES (10)..(10): Cyclobutyl-Ala
  MOD_RES (11)..(11): Alpha-methyl-L-cysteine connected by an i to i+7, seven-methylene crosslinker to another thiol-containing amino acid
  MOD_RES (14)..(14): Norleucine
  C-term NH2
LTFCEYWAQACSALA

SEQ ID NO: 2308 - protein, 15 aa, Artificial Sequence
  Description of Artificial Sequence: Synthetic peptide
  N-term Ac
  MOD_RES (4)..(4): Alpha-methyl-D-cysteine connected by an i to i+7, seven-methylene crosslinker to another thiol-containing amino acid
  misc_feature (4)..(11): Crosslink between residues
  MOD_RES (6)..(6): 4-carboxy-Phe
  MOD_RES (10)..(10): Cyclobutyl-Ala
  MOD_RES (11)..(11): Alpha-methyl-L-cysteine connected by an i to i+7, seven-methylene crosslinker to another thiol-containing amino acid
  MOD_RES (14)..(14): Norleucine
  C-term NH2
LTFCEFWAQACSALA

SEQ ID NO: 2309 - protein, 15 aa, Artificial Sequence
  Description of Artificial Sequence: Synthetic peptide
  N-term Ac
  MOD_RES (4)..(4): Alpha-methyl-D-cysteine connected by an i to i+7, seven-methylene crosslinker to another thiol-containing amino acid
  misc_feature (4)..(11): Crosslink between residues
  MOD_RES (10)..(10): Cyclobutyl-Ala
  MOD_RES (11)..(11): Alpha-methyl-L-cysteine connected by an i to i+7, seven-methylene crosslinker to another thiol-containing amino acid
  MOD_RES (14)..(14): Norleucine
  C-term NH2
LTFCEYWSQACSALA

SEQ ID NO: 2310 - protein, 15 aa, Artificial Sequence
  Description of Artificial Sequence: Synthetic peptide
  N-term Ac
  MOD_RES (4)..(4): Alpha-methyl-D-cysteine connected by an i to i+7, seven-methylene crosslinker to another thiol-containing amino acid
  misc_feature (4)..(11): Crosslink between residues
  MOD_RES (10)..(10): Cyclobutyl-Ala
  MOD_RES (11)..(11): Alpha-methyl-L-cysteine connected by an i to i+7, seven-methylene crosslinker to another thiol-containing amino acid
  MOD_RES (14)..(14): Norleucine
  C-term NH2
LTFCEYWWQACSALA

SEQ ID NO: 2311 - protein, 15 aa, Artificial Sequence
  Description of Artificial Sequence: Synthetic peptide
  N-term Ac
  MOD_RES (4)..(4): Alpha-methyl-D-cysteine connected by an i to i+7, seven-methylene crosslinker to another thiol-containing amino acid
  misc_feature (4)..(11): Crosslink between residues
  MOD_RES (10)..(10): Cyclobutyl-Ala
  MOD_RES (11)..(11): Alpha-methyl-L-cysteine connected by an i to i+7, seven-methylene crosslinker to another thiol-containing amino acid
  MOD_RES (15)..(15): D-amino acid
  C-term NH2
LTFCEYWAQACAAIA

SEQ ID NO: 2312 - protein, 15 aa, Artificial Sequence
  Description of Artificial Sequence: Synthetic peptide
  N-term Ac
  MOD_RES (3)..(3): 3,4-difluoro-Phe
  MOD_RES (4)..(4): Alpha-methyl-D-cysteine connected by an i to i+7, seven-methylene crosslinker to another thiol-containing amino acid
  misc_feature (4)..(11): Crosslink between residues
  MOD_RES (10)..(10): Cyclobutyl-Ala
  MOD_RES (11)..(11): Alpha-methyl-L-cysteine connected by an i to i+7, seven-methylene crosslinker to another thiol-containing amino acid
  MOD_RES (15)..(15): D-amino acid
  C-term NH2
LTFCEYWAQACAAIA

SEQ ID NO: 2313 - protein, 15 aa, Artificial Sequence
  Description of Artificial Sequence: Synthetic peptide
  N-term Ac
  MOD_RES (4)..(4): Alpha-methyl-D-cysteine connected by an i to i+7, seven-methylene crosslinker to another thiol-containing amino acid
  misc_feature (4)..(11): Crosslink between residues
  MOD_RES (6)..(6): 4-carboxy-Phe
  MOD_RES (10)..(10): Cyclobutyl-Ala
  MOD_RES (11)..(11): Alpha-methyl-L-cysteine connected by an i to i+7, seven-methylene crosslinker to another thiol-containing amino acid
  MOD_RES (15)..(15): D-amino acid
  C-term NH2
LTFCEFWAQACAAIA

SEQ ID NO: 2314 - protein, 14 aa, Artificial Sequence
  Description of Artificial Sequence: Synthetic peptide
  N-term Pam
  MOD_RES (4)..(4): Alpha-methyl-D-cysteine connected by an i to i+7, seven-methylene crosslinker to another thiol-containing amino acid
  misc_feature (4)..(11): Crosslink between residues
  MOD_RES (10)..(10): Cyclobutyl-Ala
  MOD_RES (11)..(11): Alpha-methyl-L-cysteine connected by an i to i+7, seven-methylene crosslinker to another thiol-containing amino acid
  C-term NH2
ETFCEYWAQACSAA

SEQ ID NO: 2315 - protein, 14 aa, Artificial Sequence
  Description of Artificial Sequence: Synthetic peptide
  N-term Ac
  MOD_RES (3)..(3): homo-Phe
  MOD_RES (4)..(4): Alpha-methyl-D-cysteine connected by an i to i+7, seven-methylene crosslinker to another thiol-containing amino acid
  misc_feature (4)..(11): Crosslink between residues
  MOD_RES (10)..(10): Cyclobutyl-Ala
  MOD_RES (11)..(11): Alpha-methyl-L-cysteine connected by an i to i+7, seven-methylene crosslinker to another thiol-containing amino acid
  C-term NH2
LTFCEFWAQACSAA

SEQ ID NO: 2316 - protein, 14 aa, Artificial Sequence
  Description of Artificial Sequence: Synthetic peptide
  N-term Ac
  MOD_RES (4)..(4): Alpha-methyl-D-cysteine connected by an i to i+7, seven-methylene crosslinker to another thiol-containing amino acid
  misc_feature (4)..(11): Crosslink between residues
  MOD_RES (10)..(10): Cyclobutyl-Ala
  MOD_RES (11)..(11): Alpha-methyl-L-cysteine connected by an i to i+7, seven-methylene crosslinker to another thiol-containing amino acid
  C-term NH2
LTACEYWAQACSAA

SEQ ID NO: 2317 - protein, 14 aa, Artificial Sequence
  Description of Artificial Sequence: Synthetic peptide
  N-term Ac
  MOD_RES (4)..(4): Alpha-methyl-D-cysteine connected by an i to i+7, seven-methylene crosslinker to another thiol-containing amino acid
  misc_feature (4)..(11): Crosslink between residues
  MOD_RES (10)..(10): Cyclobutyl-Ala
  MOD_RES (11)..(11): Alpha-methyl-L-cysteine connected by an i to i+7, seven-methylene crosslinker to another thiol-containing amino acid
  C-term NH2
LTFCEYAAQACSAA

SEQ ID NO: 2318 - protein, 14 aa, Artificial Sequence
  Description of Artificial Sequence: Synthetic peptide
  N-term Ac
  MOD_RES (4)..(4): Alpha-methyl-D-cysteine connected by an i to i+7, seven-methylene crosslinker to another thiol-containing amino acid
  misc_feature (4)..(11): Crosslink between residues
  MOD_RES (7)..(7): 2Nal
  MOD_RES (10)..(10): Cyclobutyl-Ala
  MOD_RES (11)..(11): Alpha-methyl-L-cysteine connected by an i to i+7, seven-methylene crosslinker to another thiol-containing amino acid
  C-term NH2
LTFCEYAAQACSAA

SEQ ID NO: 2319 - protein, 14 aa, Artificial Sequence
  Description of Artificial Sequence: Synthetic peptide
  N-term Ac
  MOD_RES (4)..(4): Alpha-methyl-D-cysteine connected by an i to i+7, seven-methylene crosslinker to another thiol-containing amino acid
  misc_feature (4)..(11): Crosslink between residues
  MOD_RES (10)..(10): Cyclobutyl-Ala
  MOD_RES (11)..(11): Alpha-methyl-L-cysteine connected by an i to i+7, seven-methylene crosslinker to another thiol-containing amino acid
  C-term NH2
LTFCAYWAQACSAA

SEQ ID NO: 2320 - protein, 14 aa, Artificial Sequence
  Description of Artificial Sequence: Synthetic peptide
  N-term Ac
  MOD_RES (4)..(4): Alpha-methyl-D-cysteine connected by an i to i+7, seven-methylene crosslinker to another thiol-containing amino acid
  misc_feature (4)..(11): Crosslink between residues
  MOD_RES (10)..(10): Cyclobutyl-Ala
  MOD_RES (11)..(11): Alpha-methyl-L-cysteine connected by an i to i+7, seven-methylene crosslinker to another thiol-containing amino acid
  C-term NH2
LTFCEYWAQACSAF

SEQ ID NO: 2321 - protein, 15 aa, Artificial Sequence
  Description of Artificial Sequence: Synthetic peptide
  N-term Ac
  MOD_RES (4)..(4): Alpha-methyl-D-cysteine connected by an i to i+7, seven-methylene crosslinker to another thiol-containing amino acid
  misc_feature (4)..(11): Crosslink between residues
  MOD_RES (10)..(10): Cyclobutyl-Ala
  MOD_RES (11)..(11): Alpha-methyl-L-cysteine connected by an i to i+7, seven-methylene crosslinker to another thiol-containing amino acid
  MOD_RES (15)..(15): D-amino acid
  C-term NH2
LTFCEYWAQACSAFA

SEQ ID NO: 2322 - protein, 14 aa, Artificial Sequence
  Description of Artificial Sequence: Synthetic peptide
  N-term Ac
  MOD_RES (4)..(4): Alpha-methyl-D-cysteine connected by an i to i+7, seven-methylene crosslinker to another thiol-containing amino acid
  misc_feature (4)..(11): Crosslink between residues
  MOD_RES (10)..(10): Cyclobutyl-Ala
  MOD_RES (11)..(11): Alpha-methyl-L-cysteine connected by an i to i+7, seven-methylene crosslinker to another thiol-containing amino acid
  C-term NH2
LTFCAYWAQACSAF

SEQ ID NO: 2323 - protein, 14 aa, Artificial Sequence
  Description of Artificial Sequence: Synthetic peptide
  N-term Ac
  MOD_RES (3)..(3): 3,4-difluoro-Phe
  MOD_RES (4)..(4): Alpha-methyl-D-cysteine connected by an i to i+7, seven-methylene crosslinker to another thiol-containing amino acid
  misc_feature (4)..(11): Crosslink between residues
  MOD_RES (10)..(10): Cyclobutyl-Ala
  MOD_RES (11)..(11): Alpha-methyl-L-cysteine connected by an i to i+7, seven-methylene crosslinker to another thiol-containing amino acid
  C-term NH2
LTFCAYWAQACSAF

SEQ ID NO: 2324 - protein, 14 aa, Artificial Sequence
  Description of Artificial Sequence: Synthetic peptide
  N-term Ac
  MOD_RES (4)..(4): Alpha-methyl-D-cysteine connected by an i to i+7, seven-methylene crosslinker to another thiol-containing amino acid
  misc_feature (4)..(11): Crosslink between residues
  MOD_RES (6)..(6): 4-carboxy-Phe
  MOD_RES (10)..(10): Cyclobutyl-Ala
  MOD_RES (11)..(11): Alpha-methyl-L-cysteine connected by an i to i+7, seven-methylene crosslinker to another thiol-containing amino acid
  C-term NH2
LTFCAFWAQACSAF

SEQ ID NO: 2325 - protein, 14 aa, Artificial Sequence
  Description of Artificial Sequence: Synthetic peptide
  N-term Ac
  MOD_RES (4)..(4): Alpha-methyl-D-cysteine connected by an i to i+7, seven-methylene crosslinker to another thiol-containing amino acid
  misc_feature (4)..(11): Crosslink between residues
  MOD_RES (7)..(7): 6cl-Trp
  MOD_RES (10)..(10): Cyclobutyl-Ala
  MOD_RES (11)..(11): Alpha-methyl-L-cysteine connected by an i to i+7, seven-methylene crosslinker to another thiol-containing amino acid
  C-term NH2
LTFCEYWAQACSAF

SEQ ID NO: 2326 - protein, 14 aa, Artificial Sequence
  Description of Artificial Sequence: Synthetic peptide
  N-term Ac
  MOD_RES (4)..(4): Alpha-methyl-D-cysteine connected by an i to i+7, seven-methylene crosslinker to another thiol-containing amino acid
  misc_feature (4)..(11): Crosslink between residues
  MOD_RES (10)..(10): Cyclobutyl-Ala
  MOD_RES (11)..(11): Alpha-methyl-L-cysteine connected by an i to i+7, seven-methylene crosslinker to another thiol-containing amino acid
  C-term NH2
LTFCAYWSQACSAF

SEQ ID NO: 2327 - protein, 14 aa, Artificial Sequence
  Description of Artificial Sequence: Synthetic peptide
  N-term Ac
  MOD_RES (4)..(4): Alpha-methyl-D-cysteine connected by an i to i+7, seven-methylene crosslinker to another thiol-containing amino acid
  misc_feature (4)..(11): Crosslink between residues
  MOD_RES (10)..(10): Cyclobutyl-Ala
  MOD_RES (11)..(11): Alpha-methyl-L-cysteine connected by an i to i+7, seven-methylene crosslinker to another thiol-containing amino acid
  C-term NH2
LTFCAYWWQACSAF

SEQ ID NO: 2328 - protein, 15 aa, Artificial Sequence
  Description of Artificial Sequence: Synthetic peptide
  N-term Ac
  MOD_RES (4)..(4): Alpha-methyl-D-cysteine connected by an i to i+7, seven-methylene crosslinker to another thiol-containing amino acid
  misc_feature (4)..(11): Crosslink between residues
  MOD_RES (10)..(10): Cyclobutyl-Ala
  MOD_RES (11)..(11): Alpha-methyl-L-cysteine connected by an i to i+7, seven-methylene crosslinker to another thiol-containing amino acid
  MOD_RES (15)..(15): D-amino acid
  C-term NH2
LTFCAYWAQACAAIA

SEQ ID NO: 2329 - protein, 15 aa, Artificial Sequence
  Description of Artificial Sequence: Synthetic peptide
  N-term Ac
  MOD_RES (3)..(3): 3,4-difluoro-Phe
  MOD_RES (4)..(4): Alpha-methyl-D-cysteine connected by an i to i+7, seven-methylene crosslinker to another thiol-containing amino acid
  misc_feature (4)..(11): Crosslink between residues
  MOD_RES (10)..(10): Cyclobutyl-Ala
  MOD_RES (11)..(11): Alpha-methyl-L-cysteine connected by an i to i+7, seven-methylene crosslinker to another thiol-containing amino acid
  MOD_RES (15)..(15): D-amino acid
  C-term NH2
LTFCAYWAQACAAIA

SEQ ID NO: 2330 - protein, 15 aa, Artificial Sequence
  Description of Artificial Sequence: Synthetic peptide
  N-term Ac
  MOD_RES (4)..(4): Alpha-methyl-D-cysteine connected by an i to i+7, seven-methylene crosslinker to another thiol-containing amino acid
  misc_feature (4)..(11): Crosslink between residues
  MOD_RES (7)..(7): 6cl-Trp
  MOD_RES (10)..(10): Cyclobutyl-Ala
  MOD_RES (11)..(11): Alpha-methyl-L-cysteine connected by an i to i+7, seven-methylene crosslinker to another thiol-containing amino acid
  MOD_RES (15)..(15): D-amino acid
  C-term NH2
LTFCAYWAQACAAIA

SEQ ID NO: 2331 - protein, 15 aa, Artificial Sequence
  Description of Artificial Sequence: Synthetic peptide
  N-term Ac
  MOD_RES (4)..(4): Alpha-methyl-D-cysteine connected by an i to i+7, seven-methylene crosslinker to another thiol-containing amino acid
  misc_feature (4)..(11): Crosslink between residues
  MOD_RES (6)..(6): 4-carboxy-Phe
  MOD_RES (10)..(10): Cyclobutyl-Ala
  MOD_RES (11)..(11): Alpha-methyl-L-cysteine connected by an i to i+7, seven-methylene crosslinker to another thiol-containing amino acid
  MOD_RES (15)..(15): D-amino acid
  C-term NH2
LTFCAFWAQACAAIA

SEQ ID NO: 2332 - protein, 15 aa, Artificial Sequence
  Description of Artificial Sequence: Synthetic peptide
  N-term Ac
  MOD_RES (4)..(4): Alpha-methyl-D-cysteine connected by an i to i+7, seven-methylene crosslinker to another thiol-containing amino acid
  misc_feature (4)..(11): Crosslink between residues
  MOD_RES (10)..(10): Cyclobutyl-Ala
  MOD_RES (11)..(11): Alpha-methyl-L-cysteine connected by an i to i+7, seven-methylene crosslinker to another thiol-containing amino acid
  MOD_RES (15)..(15): D-amino acid
  C-term NH2
LTFCEYWAQACAAFA

SEQ ID NO: 2333 - protein, 15 aa, Artificial Sequence
  Description of Artificial Sequence: Synthetic peptide
  N-term Ac
  MOD_RES (4)..(4): Alpha-methyl-D-cysteine connected by an i to i+7, seven-methylene crosslinker to another thiol-containing amino acid
  misc_feature (4)..(11): Crosslink between residues
  MOD_RES (10)..(10): Cyclobutyl-Ala
  MOD_RES (11)..(11): Alpha-methyl-L-cysteine connected by an i to i+7, seven-methylene crosslinker to another thiol-containing amino acid
  MOD_RES (15)..(15): D-amino acid
  C-term NH2
LTFCEYWAQACAAFA

SEQ ID NO: 2334 - protein, 15 aa, Artificial Sequence
  Description of Artificial Sequence: Synthetic peptide
  N-term Ac
  MOD_RES (4)..(4): Alpha-methyl-D-cysteine connected by an i to i+7, seven-methylene crosslinker to another thiol-containing amino acid
  misc_feature (4)..(11): Crosslink between residues
  MOD_RES (10)..(10): Cyclobutyl-Ala
  MOD_RES (11)..(11): Alpha-methyl-L-cysteine connected by an i to i+7, seven-methylene crosslinker to another thiol-containing amino acid
  MOD_RES (14)..(14): Norleucine
  MOD_RES (15)..(15): D-amino acid
  C-term NH2
ETFCAYWAQACAWLA

SEQ ID NO: 2335 - protein, 15 aa, Artificial Sequence
  Description of Artificial Sequence: Synthetic peptide
  N-term Ac
  MOD_RES (4)..(4): Alpha-methyl-D-cysteine connected by an i to i+7, seven-methylene crosslinker to another thiol-containing amino acid
  misc_feature (4)..(11): Crosslink between residues
  MOD_RES (10)..(10): Cyclobutyl-Ala
  MOD_RES (11)..(11): Alpha-methyl-L-cysteine connected by an i to i+7, seven-methylene crosslinker to another thiol-containing amino acid
  MOD_RES (14)..(14): Norleucine
  MOD_RES (15)..(15): D-amino acid
  C-term NH2
LTFCEYWAQACAWLA

SEQ ID NO: 2336 - protein, 15 aa, Artificial Sequence
  Description of Artificial Sequence: Synthetic peptide
  N-term Ac
  MOD_RES (4)..(4): Alpha-methyl-D-cysteine connected by an i to i+7, seven-methylene crosslinker to another thiol-containing amino acid
  misc_feature (4)..(11): Crosslink between residues
  MOD_RES (10)..(10): Cyclobutyl-Ala
  MOD_RES (11)..(11): Alpha-methyl-L-cysteine connected by an i to i+7, seven-methylene crosslinker to another thiol-containing amino acid
  MOD_RES (14)..(14): Norleucine
  MOD_RES (15)..(15): D-amino acid
  C-term NH2
ETFCEYWAQACAWLA

SEQ ID NO: 2337 - protein, 15 aa, Artificial Sequence
  Description of Artificial Sequence: Synthetic peptide
  N-term Ac
  MOD_RES (4)..(4): Alpha-methyl-D-cysteine connected by an i to i+7, seven-methylene crosslinker to another thiol-containing amino acid
  misc_feature (4)..(11): Crosslink between residues
  MOD_RES (10)..(10): Cyclobutyl-Ala
  MOD_RES (11)..(11): Alpha-methyl-L-cysteine connected by an i to i+7, seven-methylene crosslinker to another thiol-containing amino acid
  MOD_RES (14)..(14): Norleucine
  MOD_RES (15)..(15): D-amino acid
  C-term NH2
ETFCEYWAQACAWLA

SEQ ID NO: 2338 - protein, 15 aa, Artificial Sequence
  Description of Artificial Sequence: Synthetic peptide
  N-term Ac
  MOD_RES (4)..(4): Alpha-methyl-D-cysteine connected by an i to i+7, seven-methylene crosslinker to another thiol-containing amino acid
  misc_feature (4)..(11): Crosslink between residues
  MOD_RES (10)..(10): Cyclobutyl-Ala
  MOD_RES (11)..(11): Alpha-methyl-L-cysteine connected by an i to i+7, seven-methylene crosslinker to another thiol-containing amino acid
  MOD_RES (15)..(15): D-amino acid
  C-term NH2
LTFCAYWAQACSAFA

SEQ ID NO: 2339 - protein, 15 aa, Artificial Sequence
  Description of Artificial Sequence: Synthetic peptide
  N-term Ac
  MOD_RES (4)..(4): Alpha-methyl-D-cysteine connected by an i to i+7, seven-methylene crosslinker to another thiol-containing amino acid
  misc_feature (4)..(11): Crosslink between residues
  MOD_RES (10)..(10): Cyclobutyl-Ala
  MOD_RES (11)..(11): Alpha-methyl-L-cysteine connected by an i to i+7, seven-methylene crosslinker to another thiol-containing amino acid
  MOD_RES (15)..(15): D-amino acid
  C-term NH2
LTFCAYWAQACSAFA

SEQ ID NO: 2340 - protein, 15 aa, Artificial Sequence
  Description of Artificial Sequence: Synthetic peptide
  N-term Ac
  MOD_RES (4)..(4): Alpha-methyl-D-cysteine connected by an i to i+7, seven-methylene crosslinker to another thiol-containing amino acid
  misc_feature (4)..(11): Crosslink between residues
  MOD_RES (11)..(11): Alpha-methyl-L-cysteine connected by an i to i+7, seven-methylene crosslinker to another thiol-containing amino acid
  MOD_RES (14)..(14): Norleucine
  MOD_RES (15)..(15): D-amino acid
  C-term NH2
ETFCAYWAQLCAWLA

SEQ ID NO: 2341 - protein, 15 aa, Artificial Sequence
  Description of Artificial Sequence: Synthetic peptide
  N-term Ac
  MOD_RES (4)..(4): Alpha-methyl-D-cysteine connected by an i to i+7, seven-methylene crosslinker to another thiol-containing amino acid
  misc_feature (4)..(11): Crosslink between residues
  MOD_RES (11)..(11): Alpha-methyl-L-cysteine connected by an i to i+7, seven-methylene crosslinker to another thiol-containing amino acid
  MOD_RES (14)..(14): Norleucine
  MOD_RES (15)..(15): D-amino acid
  C-term NH2
LTFCEYWAQLCAWLA

SEQ ID NO: 2342 - protein, 15 aa, Artificial Sequence
  Description of Artificial Sequence: Synthetic peptide
  N-term Ac
  MOD_RES (4)..(4): Alpha-methyl-D-cysteine connected by an i to i+7, seven-methylene crosslinker to another thiol-containing amino acid
  misc_feature (4)..(11): Crosslink between residues
  MOD_RES (11)..(11): Alpha-methyl-L-cysteine connected by an i to i+7, seven-methylene crosslinker to another thiol-containing amino acid
  MOD_RES (14)..(14): Norleucine
  MOD_RES (15)..(15): D-amino acid
  C-term NH2
ETFCEYWAQLCAWLA

SEQ ID NO: 2343 - protein, 14 aa, Artificial Sequence
  Description of Artificial Sequence: Synthetic peptide
  N-term Dmaac
  MOD_RES (4)..(4): Alpha-methyl-D-cysteine connected by an i to i+7, seven-methylene crosslinker to another thiol-containing amino acid
  misc_feature (4)..(11): Crosslink between residues
  MOD_RES (10)..(10): homo-Leu
  MOD_RES (11)..(11): Alpha-methyl-L-cysteine connected by an i to i+7, seven-methylene crosslinker to another thiol-containing amino acid
  C-term NH2
LTFCEYWAQLCSAA

SEQ ID NO: 2344 - protein, 14 aa, Artificial Sequence
  Description of Artificial Sequence: Synthetic peptide
  N-term Hexac
  MOD_RES (4)..(4): Alpha-methyl-D-cysteine connected by an i to i+7, seven-methylene crosslinker to another thiol-containing amino acid
  misc_feature (4)..(11): Crosslink between residues
  MOD_RES (10)..(10): homo-Leu
  MOD_RES (11)..(11): Alpha-methyl-L-cysteine connected by an i to i+7, seven-methylene crosslinker to another thiol-containing amino acid
  C-term NH2
LTFCEYWAQLCSAA

SEQ ID NO: 2345 - protein, 14 aa, Artificial Sequence
  Description of Artificial Sequence: Synthetic peptide
  N-term Napac
  MOD_RES (4)..(4): Alpha-methyl-D-cysteine connected by an i to i+7, seven-methylene crosslinker to another thiol-containing amino acid
  misc_feature (4)..(11): Crosslink between residues
  MOD_RES (10)..(10): homo-Leu
  MOD_RES (11)..(11): Alpha-methyl-L-cysteine connected by an i to i+7, seven-methylene crosslinker to another thiol-containing amino acid
  C-term NH2
LTFCEYWAQLCSAA

SEQ ID NO: 2346 - protein, 14 aa, Artificial Sequence
  Description of Artificial Sequence: Synthetic peptide
  N-term Decac
  MOD_RES (4)..(4): Alpha-methyl-D-cysteine connected by an i to i+7, seven-methylene crosslinker to another thiol-containing amino acid
  misc_feature (4)..(11): Crosslink between residues
  MOD_RES (10)..(10): homo-Leu
  MOD_RES (11)..(11): Alpha-methyl-L-cysteine connected by an i to i+7, seven-methylene crosslinker to another thiol-containing amino acid
  C-term NH2
LTFCEYWAQLCSAA

SEQ ID NO: 2347 - protein, 14 aa, Artificial Sequence
  Description of Artificial Sequence: Synthetic peptide
  N-term Admac
  MOD_RES (4)..(4): Alpha-methyl-D-cysteine connected by an i to i+7, seven-methylene crosslinker to another thiol-containing amino acid
  misc_feature (4)..(11): Crosslink between residues
  MOD_RES (10)..(10): homo-Leu
  MOD_RES (11)..(11): Alpha-methyl-L-cysteine connected by an i to i+7, seven-methylene crosslinker to another thiol-containing amino acid
  C-term NH2
LTFCEYWAQLCSAA

SEQ ID NO: 2348 - protein, 14 aa, Artificial Sequence
  Description of Artificial Sequence: Synthetic peptide
  N-term Tmac
  MOD_RES (4)..(4): Alpha-methyl-D-cysteine connected by an i to i+7, seven-methylene crosslinker to another thiol-containing amino acid
  misc_feature (4)..(11): Crosslink between residues
  MOD_RES (10)..(10): homo-Leu
  MOD_RES (11)..(11): Alpha-methyl-L-cysteine connected by an i to i+7, seven-methylene crosslinker to another thiol-containing amino acid
  C-term NH2
LTFCEYWAQLCSAA

SEQ ID NO: 2349 - protein, 14 aa, Artificial Sequence
  Description of Artificial Sequence: Synthetic peptide
  N-term Pam
  MOD_RES (4)..(4): Alpha-methyl-D-cysteine connected by an i to i+7, seven-methylene crosslinker to another thiol-containing amino acid
  misc_feature (4)..(11): Crosslink between residues
  MOD_RES (10)..(10): homo-Leu
  MOD_RES (11)..(11): Alpha-methyl-L-cysteine connected by an i to i+7, seven-methylene crosslinker to another thiol-containing amino acid
  C-term NH2
LTFCEYWAQLCSAA

SEQ ID NO: 2350 - protein, 15 aa, Artificial Sequence
  Description of Artificial Sequence: Synthetic peptide
  N-term Ac
  MOD_RES (4)..(4): Alpha-methyl-D-cysteine connected by an i to i+7, seven-methylene crosslinker to another thiol-containing amino acid
  misc_feature (4)..(11): Crosslink between residues
  MOD_RES (10)..(10): Cyclobutyl-Ala
  MOD_RES (11)..(11): Alpha-methyl-L-cysteine connected by an i to i+7, seven-methylene crosslinker to another thiol-containing amino acid
  MOD_RES (14)..(14): Norleucine
  C-term NH2
LTFCAYWAQACAALA

SEQ ID NO: 2351 - protein, 15 aa, Artificial Sequence
  Description of Artificial Sequence: Synthetic peptide
  N-term Ac
  MOD_RES (3)..(3): 3,4-difluoro-Phe
  MOD_RES (4)..(4): Alpha-methyl-D-cysteine connected by an i to i+7, seven-methylene crosslinker to another thiol-containing amino acid
  misc_feature (4)..(11): Crosslink between residues
  MOD_RES (10)..(10): Cyclobutyl-Ala
  MOD_RES (11)..(11): Alpha-methyl-L-cysteine connected by an i to i+7, seven-methylene crosslinker to another thiol-containing amino acid
  MOD_RES (15)..(15): D-amino acid
  C-term NH2
LTFCEYWAQACAAIA

SEQ ID NO: 2352 - protein, 14 aa, Artificial Sequence
  Description of Artificial Sequence: Synthetic peptide
  N-term Ac
  MOD_RES (3)..(3): 3,4-difluoro-Phe
  MOD_RES (4)..(4): Alpha-methyl-D-cysteine connected by an i to i+7, seven-methylene crosslinker to another thiol-containing amino acid
  misc_feature (4)..(11): Crosslink between residues
  MOD_RES (10)..(10): Cyclobutyl-Ala
  MOD_RES (11)..(11): Alpha-methyl-L-cysteine connected by an i to i+7, seven-methylene crosslinker to another thiol-containing amino acid
  C-term NH2
LTFCEYWAQACSAA

SEQ ID NO: 2353 - protein, 14 aa, Artificial Sequence
  Description of Artificial Sequence: Synthetic peptide
  N-term Ac
  MOD_RES (3)..(3): 3,4-difluoro-Phe
  MOD_RES (4)..(4): Alpha-methyl-D-cysteine connected by an i to i+7, seven-methylene crosslinker to another thiol-containing amino acid
  misc_feature (4)..(11): Crosslink between residues
  MOD_RES (10)..(10): Cyclobutyl-Ala
  MOD_RES (11)..(11): Alpha-methyl-L-cysteine connected by an i to i+7, seven-methylene crosslinker to another thiol-containing amino acid
  C-term NH2
LTFCEYWAQACSAA

SEQ ID NO: 2354 - protein, 14 aa, Artificial Sequence
  Description of Artificial Sequence: Synthetic peptide
  N-term Ac
  MOD_RES (4)..(4): Alpha-methyl-D-cysteine connected by an i to i+7, seven-methylene crosslinker to another thiol-containing amino acid
  misc_feature (4)..(11): Crosslink between residues
  MOD_RES (6)..(6): 4-carboxy-Phe
  MOD_RES (10)..(10): Cyclobutyl-Ala
  MOD_RES (11)..(11): Alpha-methyl-L-cysteine connected by an i to i+7, seven-methylene crosslinker to another thiol-containing amino acid
  C-term NH2
LTFCEFWAQACSAA

SEQ ID NO: 2355 - protein, 14 aa, Artificial Sequence
  Description of Artificial Sequence: Synthetic peptide
  N-term Ac
  MOD_RES (4)..(4): Alpha-methyl-D-cysteine connected by an i to i+7, seven-methylene crosslinker to another thiol-containing amino acid
  misc_feature (4)..(11): Crosslink between residues
  MOD_RES (6)..(6): 4-carboxy-Phe
  MOD_RES (10)..(10): Cyclobutyl-Ala
  MOD_RES (11)..(11): Alpha-methyl-L-cysteine connected by an i to i+7, seven-methylene crosslinker to another thiol-containing amino acid
  C-term NH2
LTFCEFWAQACSAA

SEQ ID NO: 2356 - protein, 14 aa, Artificial Sequence
  Description of Artificial Sequence: Synthetic peptide
  N-term Ac
  MOD_RES (4)..(4): Alpha-methyl-D-cysteine connected by an i to i+7, seven-methylene crosslinker to another thiol-containing amino acid
  misc_feature (4)..(11): Crosslink between residues
  MOD_RES (10)..(10): Cyclobutyl-Ala
  MOD_RES (11)..(11): Alpha-methyl-L-cysteine connected by an i to i+7, seven-methylene crosslinker to another thiol-containing amino acid
  C-term NH2
LTFCEYWSQACSAA

SEQ ID NO: 2357 - protein, 14 aa, Artificial Sequence
  Description of Artificial Sequence: Synthetic peptide
  N-term Ac
  MOD_RES (4)..(4): Alpha-methyl-D-cysteine connected by an i to i+7, seven-methylene crosslinker to another thiol-containing amino acid
  misc_feature (4)..(11): Crosslink between residues
  MOD_RES (10)..(10): Cyclobutyl-Ala
  MOD_RES (11)..(11): Alpha-methyl-L-cysteine connected by an i to i+7, seven-methylene crosslinker to another thiol-containing amino acid
  C-term NH2
LTFCEYWSQACSAA

SEQ ID NO: 2358 - protein, 14 aa, Artificial Sequence
  Description of Artificial Sequence: Synthetic peptide
  N-term Ac
  MOD_RES (4)..(4): Alpha-methyl-D-cysteine connected by an i to i+7, seven-methylene crosslinker to another thiol-containing amino acid
  misc_feature (4)..(11): Crosslink between residues
  MOD_RES (10)..(10): homo-Leu
  MOD_RES (11)..(11): Alpha-methyl-L-cysteine connected by an i to i+7, seven-methylene crosslinker to another thiol-containing amino acid
  C-term NH2
LTFCEYWAQLCSAA

SEQ ID NO: 2359 - protein, 14 aa, Artificial Sequence
  Description of Artificial Sequence: Synthetic peptide
  N-term Ac
  MOD_RES (4)..(4): Alpha-methyl-D-cysteine connected by an i to i+7, seven-methylene crosslinker to another thiol-containing amino acid
  misc_feature (4)..(11): Crosslink between residues
  MOD_RES (10)..(10): homo-Leu
  MOD_RES (11)..(11): Alpha-methyl-L-cysteine connected by an i to i+7, seven-methylene crosslinker to another thiol-containing amino acid
  C-term NH2
LTFCAYWAQLCSAF

SEQ ID NO: 2360 - protein, 14 aa, Artificial Sequence
  Description of Artificial Sequence: Synthetic peptide
  N-term Ac
  MOD_RES (4)..(4): Alpha-methyl-D-cysteine connected by an i to i+7, seven-methylene crosslinker to another thiol-containing amino acid
  misc_feature (4)..(11): Crosslink between residues
  MOD_RES (10)..(10): homo-Leu
  MOD_RES (11)..(11): Alpha-methyl-L-cysteine connected by an i to i+7, seven-methylene crosslinker to another thiol-containing amino acid
  C-term NH2
LTFCAYWAQLCSAF

SEQ ID NO: 2361 - protein, 14 aa, Artificial Sequence
  Description of Artificial Sequence: Synthetic peptide
  N-term Ac
  MOD_RES (3)..(3): 3,4-difluoro-Phe
  MOD_RES (4)..(4): Alpha-methyl-D-cysteine connected by an i to i+7, seven-methylene crosslinker to another thiol-containing amino acid
  misc_feature (4)..(11): Crosslink between residues
  MOD_RES (10)..(10): homo-Leu
  MOD_RES (11)..(11): Alpha-methyl-L-cysteine connected by an i to i+7, seven-methylene crosslinker to another thiol-containing amino acid
  C-term NH2
LTFCAYWAQLCSAA

SEQ ID NO: 2362 - protein, 14 aa, Artificial Sequence
  Description of Artificial Sequence: Synthetic peptide
  N-term Ac
  MOD_RES (3)..(3): 3,4-difluoro-Phe
  MOD_RES (4)..(4): Alpha-methyl-D-cysteine connected by an i to i+7, seven-methylene crosslinker to another thiol-containing amino acid
  misc_feature (4)..(11): Crosslink between residues
  MOD_RES (10)..(10): homo-Leu
  MOD_RES (11)..(11): Alpha-methyl-L-cysteine connected by an i to i+7, seven-methylene crosslinker to another thiol-containing amino acid
  C-term NH2
LTFCAYWAQLCSAA

SEQ ID NO: 2363 - protein, 14 aa, Artificial Sequence
  Description of Artificial Sequence: Synthetic peptide
  N-term Ac
  MOD_RES (4)..(4): Alpha-methyl-D-cysteine connected by an i to i+7, seven-methylene crosslinker to another thiol-containing amino acid
  misc_feature (4)..(11): Crosslink between residues
  MOD_RES (6)..(6): 4-carboxy-Phe
  MOD_RES (10)..(10): homo-Leu
  MOD_RES (11)..(11): Alpha-methyl-L-cysteine connected by an i to i+7, seven-methylene crosslinker to another thiol-containing amino acid
  C-term NH2
LTFCAFWAQLCSAA

SEQ ID NO: 2364 - protein, 14 aa, Artificial Sequence
  Description of Artificial Sequence: Synthetic peptide
  N-term Ac
  MOD_RES (4)..(4): Alpha-methyl-D-cysteine connected by an i to i+7, seven-methylene crosslinker to another thiol-containing amino acid
  misc_feature (4)..(11): Crosslink between residues
  MOD_RES (6)..(6): 4-carboxy-Phe
  MOD_RES (10)..(10): homo-Leu
  MOD_RES (11)..(11): Alpha-methyl-L-cysteine connected by an i to i+7, seven-methylene crosslinker to another thiol-containing amino acid
  C-term NH2
LTFCAFWAQLCSAA

SEQ ID NO: 2365 - protein, 14 aa, Artificial Sequence
  Description of Artificial Sequence: Synthetic peptide
  N-term Ac
  MOD_RES (4)..(4): Alpha-methyl-D-cysteine connected by an i to i+7, seven-methylene crosslinker to another thiol-containing amino acid
  misc_feature (4)..(11): Crosslink between residues
  MOD_RES (10)..(10): homo-Leu
  MOD_RES (11)..(11): Alpha-methyl-L-cysteine connected by an i to i+7, seven-methylene crosslinker to another thiol-containing amino acid
  C-term NH2
LTFCAYWSQLCSAA

SEQ ID NO: 2366 - protein, 14 aa, Artificial Sequence
  Description of Artificial Sequence: Synthetic peptide
  N-term Ac
  MOD_RES (4)..(4): Alpha-methyl-D-cysteine connected by an i to i+7, seven-methylene crosslinker to another thiol-containing amino acid
  misc_feature (4)..(11): Crosslink between residues
  MOD_RES (10)..(10): homo-Leu
  MOD_RES (11)..(11): Alpha-methyl-L-cysteine connected by an i to i+7, seven-methylene crosslinker to another thiol-containing amino acid
  C-term NH2
LTFCAYWSQLCSAA

SEQ ID NO: 2367 - protein, 15 aa, Artificial Sequence
  Description of Artificial Sequence: Synthetic peptide
  N-term Ac
  MOD_RES (4)..(4): Alpha-methyl-D-cysteine connected by an i to i+7, seven-methylene crosslinker to another thiol-containing amino acid
  misc_feature (4)..(11): Crosslink between residues
  MOD_RES (11)..(11): Alpha-methyl-L-cysteine connected by an i to i+7, seven-methylene crosslinker to another thiol-containing amino acid
  MOD_RES (14)..(14): Norleucine
  C-term NH2
LTFCEYWAQLCAALA

SEQ ID NO: 2368 - protein, 15 aa, Artificial Sequence
  Description of Artificial Sequence: Synthetic peptide
  N-term Ac
  MOD_RES (3)..(3): 3,4-difluoro-Phe
  MOD_RES (4)..(4): Alpha-methyl-D-cysteine connected by an i to i+7, seven-methylene crosslinker to another thiol-containing amino acid
  misc_feature (4)..(11): Crosslink between residues
  MOD_RES (11)..(11): Alpha-methyl-L-cysteine connected by an i to i+7, seven-methylene crosslinker to another thiol-containing amino acid
  MOD_RES (14)..(14): Norleucine
  C-term NH2
LTFCAYWAQLCAALA

SEQ ID NO: 2369 - protein, 15 aa, Artificial Sequence
  Description of Artificial Sequence: Synthetic peptide
  N-term Ac
  MOD_RES (4)..(4): Alpha-methyl-D-cysteine connected by an i to i+7, seven-methylene crosslinker to another thiol-containing amino acid
  misc_feature (4)..(11): Crosslink between residues
  MOD_RES (6)..(6): 4-carboxy-Phe
  MOD_RES (11)..(11): Alpha-methyl-L-cysteine connected by an i to i+7, seven-methylene crosslinker to another thiol-containing amino acid
  MOD_RES (14)..(14): Norleucine
  C-term NH2
LTFCAFWAQLCAALA

SEQ ID NO: 2370 - protein, 15 aa, Artificial Sequence
  Description of Artificial Sequence: Synthetic peptide
  N-term Ac
  MOD_RES (4)..(4): Alpha-methyl-D-cysteine connected by an i to i+7, seven-methylene crosslinker to another thiol-containing amino acid
  misc_feature (4)..(11): Crosslink between residues
  MOD_RES (11)..(11): Alpha-methyl-L-cysteine connected by an i to i+7, seven-methylene crosslinker to another thiol-containing amino acid
  MOD_RES (14)..(14): Norleucine
  C-term NH2
LTFCAYWSQLCAALA

SEQ ID NO: 2371 - protein, 15 aa, Artificial Sequence
  Description of Artificial Sequence: Synthetic peptide
  N-term Ac
  MOD_RES (3)..(3): 3,4-difluoro-Phe
  MOD_RES (4)..(4): Alpha-methyl-D-cysteine connected by an i to i+7, seven-methylene crosslinker to another thiol-containing amino acid
  misc_feature (4)..(11): Crosslink between residues
  MOD_RES (10)..(10): homo-Leu
  MOD_RES (11)..(11): Alpha-methyl-L-cysteine connected by an i to i+7, seven-methylene crosslinker to another thiol-containing amino acid
  MOD_RES (14)..(14): Norleucine
  C-term NH2
LTFCAYWAQLCAALA

SEQ ID NO: 2372 - protein, 15 aa, Artificial Sequence
  Description of Artificial Sequence: Synthetic peptide
  N-term Ac
  MOD_RES (3)..(3): 3,4-difluoro-Phe
  MOD_RES (4)..(4): Alpha-methyl-D-cysteine connected by an i to i+7, seven-methylene crosslinker to another thiol-containing amino acid
  misc_feature (4)..(11): Crosslink between residues
  MOD_RES (10)..(10): homo-Leu
  MOD_RES (11)..(11): Alpha-methyl-L-cysteine connected by an i to i+7, seven-methylene crosslinker to another thiol-containing amino acid
  MOD_RES (14)..(14): Norleucine
  C-term NH2
LTFCAYWAQLCAALA

SEQ ID NO: 2373 - protein, 15 aa, Artificial Sequence
  Description of Artificial Sequence: Synthetic peptide
  N-term Ac
  MOD_RES (4)..(4): Alpha-methyl-D-cysteine connected by an i to i+7, seven-methylene crosslinker to another thiol-containing amino acid
  misc_feature (4)..(11): Crosslink between residues
  MOD_RES (6)..(6): 4-carboxy-Phe
  MOD_RES (10)..(10): homo-Leu
  MOD_RES (11)..(11): Alpha-methyl-L-cysteine connected by an i to i+7, seven-methylene crosslinker to another thiol-containing amino acid
  MOD_RES (14)..(14): Norleucine
  C-term NH2
LTFCAFWAQLCAALA

SEQ ID NO: 2374 - protein, 15 aa, Artificial Sequence
  Description of Artificial Sequence: Synthetic peptide
  N-term Ac
  MOD_RES (4)..(4): Alpha-methyl-D-cysteine connected by an i to i+7, seven-methylene crosslinker to another thiol-containing amino acid
  misc_feature (4)..(11): Crosslink between residues
  MOD_RES (6)..(6): 4-carboxy-Phe
  MOD_RES (10)..(10): homo-Leu
  MOD_RES (11)..(11): Alpha-methyl-L-cysteine connected by an i to i+7, seven-methylene crosslinker to another thiol-containing amino acid
  MOD_RES (14)..(14): Norleucine
  C-term NH2
LTFCAFWAQLCAALA

SEQ ID NO: 2375 - protein, 15 aa, Artificial Sequence
  Description of Artificial Sequence: Synthetic peptide
  N-term Ac
  MOD_RES (4)..(4): Alpha-methyl-D-cysteine connected by an i to i+7, seven-methylene crosslinker to another thiol-containing amino acid
  misc_feature (4)..(11): Crosslink between residues
  MOD_RES (10)..(10): homo-Leu
  MOD_RES (11)..(11): Alpha-methyl-L-cysteine connected by an i to i+7, seven-methylene crosslinker to another thiol-containing amino acid
  MOD_RES (14)..(14): Norleucine
  C-term NH2
LTFCAYWSQLCAALA

SEQ ID NO: 2376 - protein, 15 aa, Artificial Sequence
  Description of Artificial Sequence: Synthetic peptide
  N-term Ac
  MOD_RES (4)..(4): Alpha-methyl-D-cysteine connected by an i to i+7, seven-methylene crosslinker to another thiol-containing amino acid
  misc_feature (4)..(11): Crosslink between residues
  MOD_RES (10)..(10): homo-Leu
  MOD_RES (11)..(11): Alpha-methyl-L-cysteine connected by an i to i+7, seven-methylene crosslinker to another thiol-containing amino acid
  MOD_RES (14)..(14): Norleucine
  C-term NH2
LTFCAYWSQLCAALA

SEQ ID NO: 2377 - protein, 16 aa, Artificial Sequence
  Description of Artificial Sequence: Synthetic peptide
  N-term Ac
  MOD_RES (4)..(4): Alpha-methyl-D-cysteine connected by an i to i+7, seven-methylene crosslinker to another thiol-containing amino acid
  misc_feature (4)..(11): Crosslink between residues
  MOD_RES (10)..(10): homo-Leu
  MOD_RES (11)..(11): Alpha-methyl-L-cysteine connected by an i to i+7, seven-methylene crosslinker to another thiol-containing amino acid
  MOD_RES (16)..(16): D-amino acid
  C-term NH2
LTFCAYWAQLCAAAAA

SEQ ID NO: 2378 - protein, 16 aa, Artificial Sequence
  Description of Artificial Sequence: Synthetic peptide
  N-term Ac
  MOD_RES (4)..(4): Alpha-methyl-D-cysteine connected by an i to i+7, seven-methylene crosslinker to another thiol-containing amino acid
  misc_feature (4)..(11): Crosslink between residues
  MOD_RES (10)..(10): homo-Leu
  MOD_RES (11)..(11): Alpha-methyl-L-cysteine connected by an i to i+7, seven-methylene crosslinker to another thiol-containing amino acid
  MOD_RES (16)..(16): D-amino acid
  C-term NH2
LTFCAYWAQLCAAAAA

SEQ ID NO: 2379 - protein, 17 aa, Artificial Sequence
  Description of Artificial Sequence: Synthetic peptide
  N-term Ac
  MOD_RES (4)..(4): Alpha-methyl-D-cysteine connected by an i to i+7, seven-methylene crosslinker to another thiol-containing amino acid
  misc_feature (4)..(11): Crosslink between residues
  MOD_RES (11)..(11): Alpha-methyl-L-cysteine connected by an i to i+7, seven-methylene crosslinker to another thiol-containing amino acid
  MOD_RES (17)..(17): D-amino acid
  C-term NH2
LTFCAYWAQLCAAAAAA

SEQ ID NO: 2380 - protein, 18 aa, Artificial Sequence
  Description of Artificial Sequence: Synthetic peptide
  N-term Ac
  MOD_RES (4)..(4): Alpha-methyl-D-cysteine connected by an i to i+7, seven-methylene crosslinker to another thiol-containing amino acid
  misc_feature (4)..(11): Crosslink between residues
  MOD_RES (11)..(11): Alpha-methyl-L-cysteine connected by an i to i+7, seven-methylene crosslinker to another thiol-containing amino acid
  MOD_RES (18)..(18): D-amino acid
  C-term NH2
LTFCAYWAQLCAAAAAAA

SEQ ID NO: 2381 - protein, 18 aa, Artificial Sequence
  Description of Artificial Sequence: Synthetic peptide
  N-term Ac
  MOD_RES (4)..(4): Alpha-methyl-D-cysteine connected by an i to i+7, seven-methylene crosslinker to another thiol-containing amino acid
  misc_feature (4)..(11): Crosslink between residues
  MOD_RES (11)..(11): Alpha-methyl-L-cysteine connected by an i to i+7, seven-methylene crosslinker to another thiol-containing amino acid
  MOD_RES (18)..(18): D-amino acid
  C-term NH2
LTFCAYWAQLCAAAAAAA

SEQ ID NO: 2382 - protein, 15 aa, Artificial Sequence
  Description of Artificial Sequence: Synthetic peptide
  N-term Ac
  MOD_RES (4)..(4): Alpha-methyl-D-cysteine connected by an i to i+7, seven-methylene crosslinker to another thiol-containing amino acid
  misc_feature (4)..(11): Crosslink between residues
  MOD_RES (10)..(10): homo-Leu
  MOD_RES (11)..(11): Alpha-methyl-L-cysteine connected by an i to i+7, seven-methylene crosslinker to another thiol-containing amino acid
  MOD_RES (14)..(14): Norleucine
  C-term NH2
LTFCEYWAQLCAALA

SEQ ID NO: 2383 - protein, 16 aa, Artificial Sequence
  Description of Artificial Sequence: Synthetic peptide
  N-term Ac
  MOD_RES (5)..(5): Alpha-methyl-D-cysteine connected by an i to i+7, seven-methylene crosslinker to another thiol-containing amino acid
  misc_feature (5)..(12): Crosslink between residues
  MOD_RES (12)..(12): Alpha-methyl-L-cysteine connected by an i to i+7, seven-methylene crosslinker to another thiol-containing amino acid
  MOD_RES (15)..(15): Norleucine
  C-term NH2
AATFCAYWAQLCAALA

SEQ ID NO: 2384 - protein, 16 aa, Artificial Sequence
  Description of Artificial Sequence: Synthetic peptide
  N-term Ac
  MOD_RES (4)..(4): Alpha-methyl-D-cysteine connected by an i to i+7, seven-methylene crosslinker to another thiol-containing amino acid
  misc_feature (4)..(11): Crosslink between residues
  MOD_RES (11)..(11): Alpha-methyl-L-cysteine connected by an i to i+7, seven-methylene crosslinker to another thiol-containing amino acid
  MOD_RES (14)..(14): Norleucine
  C-term NH2
LTFCAYWAQLCAALAA

SEQ ID NO: 2385 - protein, 17 aa, Artificial Sequence
  Description of Artificial Sequence: Synthetic peptide
  N-term Ac
  MOD_RES (5)..(5): Alpha-methyl-D-cysteine connected by an i to i+7, seven-methylene crosslinker to another thiol-containing amino acid
  misc_feature (5)..(12): Crosslink between residues
  MOD_RES (12)..(12): Alpha-methyl-L-cysteine connected by an i to i+7, seven-methylene crosslinker to another thiol-containing amino acid
  MOD_RES (15)..(15): Norleucine
  C-term NH2
ALTFCAYWAQLCAALAA

SEQ ID NO: 2386 - protein, 16 aa, Artificial Sequence
  Description of Artificial Sequence: Synthetic peptide
  N-term Ac
  MOD_RES (4)..(4): Alpha-methyl-D-cysteine connected by an i to i+7, seven-methylene crosslinker to another thiol-containing amino acid
  misc_feature (4)..(11): Crosslink between residues
  MOD_RES (10)..(10): Cyclobutyl-Ala
  MOD_RES (11)..(11): Alpha-methyl-L-cysteine connected by an i to i+7, seven-methylene crosslinker to another thiol-containing amino acid
  MOD_RES (14)..(14): Norleucine
  C-term NH2
LTFCAYWAQACAALAA

SEQ ID NO: 2387 - protein, 16 aa, Artificial Sequence
  Description of Artificial Sequence: Synthetic peptide
  N-term Ac
  MOD_RES (4)..(4): Alpha-methyl-D-cysteine connected by an i to i+7, seven-methylene crosslinker to another thiol-containing amino acid
  misc_feature (4)..(11): Crosslink between residues
  MOD_RES (10)..(10): homo-Leu
  MOD_RES (11)..(11): Alpha-methyl-L-cysteine connected by an i to i+7, seven-methylene crosslinker to another thiol-containing amino acid
  MOD_RES (14)..(14): Norleucine
  C-term NH2
LTFCAYWAQLCAALAA

SEQ ID NO: 2388 - protein, 15 aa, Artificial Sequence
  Description of Artificial Sequence: Synthetic peptide
  N-term Ac
  MOD_RES (4)..(4): Alpha-methyl-D-cysteine connected by an i to i+7, seven-methylene crosslinker to another thiol-containing amino acid
  misc_feature (4)..(11): Crosslink between residues
  MOD_RES (10)..(10): Cyclobutyl-Ala
  MOD_RES (11)..(11): Alpha-methyl-L-cysteine connected by an i to i+7, seven-methylene crosslinker to another thiol-containing amino acid
  C-term NH2
LTFCEYWAQACSAAA

SEQ ID NO: 2389 - protein, 15 aa, Artificial Sequence
  Description of Artificial Sequence: Synthetic peptide
  N-term Ac
  MOD_RES (4)..(4): Alpha-methyl-D-cysteine connected by an i to i+7, seven-methylene crosslinker to another thiol-containing amino acid
  misc_feature (4)..(11): Crosslink between residues
  MOD_RES (10)..(10): Cyclobutyl-Ala
  MOD_RES (11)..(11): Alpha-methyl-L-cysteine connected by an i to i+7, seven-methylene crosslinker to another thiol-containing amino acid
  C-term NH2
LTFCEYWAQACSAAA

SEQ ID NO: 2390 - protein, 16 aa, Artificial Sequence
  Description of Artificial Sequence: Synthetic peptide
  N-term Ac
  MOD_RES (4)..(4): Alpha-methyl-D-cysteine connected by an i to i+7, seven-methylene crosslinker to another thiol-containing amino acid
  misc_feature (4)..(11): Crosslink between residues
  MOD_RES (10)..(10): Cyclobutyl-Ala
  MOD_RES (11)..(11): Alpha-methyl-L-cysteine connected by an i to i+7, seven-methylene crosslinker to another thiol-containing amino acid
  C-term NH2
LTFCEYWAQACSAAAA

SEQ ID NO: 2391 - protein, 16 aa, Artificial Sequence
  Description of Artificial Sequence: Synthetic peptide
  N-term Ac
  MOD_RES (4)..(4): Alpha-methyl-D-cysteine connected by an i to i+7, seven-methylene crosslinker to another thiol-containing amino acid
  misc_feature (4)..(11): Crosslink between residues
  MOD_RES (10)..(10): Cyclobutyl-Ala
  MOD_RES (11)..(11): Alpha-methyl-L-cysteine connected by an i to i+7, seven-methylene crosslinker to another thiol-containing amino acid
  C-term NH2
LTFCEYWAQACSAAAA

SEQ ID NO: 2392 - protein, 15 aa, Artificial Sequence
  Description of Artificial Sequence: Synthetic peptide
  N-term Ac
  MOD_RES (5)..(5): Alpha-methyl-D-cysteine connected by an i to i+7, seven-methylene crosslinker to another thiol-containing amino acid
  misc_feature (5)..(12): Crosslink between residues
  MOD_RES (11)..(11): Cyclobutyl-Ala
  MOD_RES (12)..(12): Alpha-methyl-L-cysteine connected by an i to i+7, seven-methylene crosslinker to another thiol-containing amino acid
  C-term NH2
ALTFCEYWAQACSAA

SEQ ID NO: 2393 - protein, 16 aa, Artificial Sequence
  Description of Artificial Sequence: Synthetic peptide
  N-term Ac
  MOD_RES (5)..(5): Alpha-methyl-D-cysteine connected by an i to i+7, seven-methylene crosslinker to another thiol-containing amino acid
  misc_feature (5)..(12): Crosslink between residues
  MOD_RES (11)..(11): Cyclobutyl-Ala
  MOD_RES (12)..(12): Alpha-methyl-L-cysteine connected by an i to i+7, seven-methylene crosslinker to another thiol-containing amino acid
  C-term NH2
ALTFCEYWAQACSAAA

SEQ ID NO: 2394 - protein, 15 aa, Artificial Sequence
  Description of Artificial Sequence: Synthetic peptide
  N-term Ac
  MOD_RES (5)..(5): Alpha-methyl-D-cysteine connected by an i to i+7, seven-methylene crosslinker to another thiol-containing amino acid
  misc_feature (5)..(12): Crosslink between residues
  MOD_RES (11)..(11): Cyclobutyl-Ala
  MOD_RES (12)..(12): Alpha-methyl-L-cysteine connected by an i to i+7, seven-methylene crosslinker to another thiol-containing amino acid
  C-term NH2
ALTFCEYWAQACSAA

SEQ ID NO: 2395 - protein, 17 aa, Artificial Sequence
  Description of Artificial Sequence: Synthetic peptide
  N-term Ac
  MOD_RES (4)..(4): Alpha-methyl-D-cysteine connected by an i to i+7, seven-methylene crosslinker to another thiol-containing amino acid
  misc_feature (4)..(11): Crosslink between residues
  MOD_RES (11)..(11): Alpha-methyl-L-cysteine connected by an i to i+7, seven-methylene crosslinker to another thiol-containing amino acid
  MOD_RES (17)..(17): D-amino acid
  C-term NH2
LTFCEYWAQLCAAAAAA

SEQ ID NO: 2396 - protein, 14 aa, Artificial Sequence
  Description of Artificial Sequence: Synthetic peptide
  N-term Ac
  MOD_RES (4)..(4): Alpha-methyl-D-cysteine connected by an i to i+7, seven-methylene crosslinker to another thiol-containing amino acid
  misc_feature (4)..(11): Crosslink between residues
  MOD_RES (7)..(7): 6cl-Trp
  MOD_RES (10)..(10): Cyclobutyl-Ala
  MOD_RES (11)..(11): Alpha-methyl-L-cysteine connected by an i to i+7, seven-methylene crosslinker to another thiol-containing amino acid
  C-term NH2
LTFCEYWAQACSAA

SEQ ID NO: 2397 - protein, 15 aa, Artificial Sequence
  Description of Artificial Sequence: Synthetic peptide
  N-term Ac
  MOD_RES (4)..(4): Alpha-methyl-D-cysteine connected by an i to i+7, seven-methylene crosslinker to another thiol-containing amino acid
  misc_feature (4)..(11): Crosslink between residues
  MOD_RES (6)..(6): 4-carboxy-Phe
  MOD_RES (7)..(7): 6cl-Trp
  MOD_RES (10)..(10): Cyclobutyl-Ala
  MOD_RES (11)..(11): Alpha-methyl-L-cysteine connected by an i to i+7, seven-methylene crosslinker to another thiol-containing amino acid
  MOD_RES (14)..(14): Norleucine
  C-term NH2
LTFCEFWAQACSALA

SEQ ID NO: 2398 - protein, 15 aa, Artificial Sequence
  Description of Artificial Sequence: Synthetic peptide
  N-term Ac
  MOD_RES (4)..(4): Alpha-methyl-D-cysteine connected by an i to i+7, seven-methylene crosslinker to another thiol-containing amino acid
  misc_feature (4)..(11): Crosslink between residues
  MOD_RES (6)..(6): 4-carboxy-Phe
  MOD_RES (7)..(7): 6cl-Trp
  MOD_RES (10)..(10): Cyclobutyl-Ala
  MOD_RES (11)..(11): Alpha-methyl-L-cysteine connected by an i to i+7, seven-methylene crosslinker to another thiol-containing amino acid
  MOD_RES (14)..(14): Norleucine
  C-term NH2
LTFCEFWAQACSALA

SEQ ID NO: 2399 - protein, 15 aa, Artificial Sequence
  Description of Artificial Sequence: Synthetic peptide
  N-term Ac
  MOD_RES (4)..(4): Alpha-methyl-D-cysteine connected by an i to i+7, seven-methylene crosslinker to another thiol-containing amino acid
  misc_feature (4)..(11): Crosslink between residues
  MOD_RES (6)..(6): 4-carboxy-Phe
  MOD_RES (7)..(7): 6cl-Trp
  MOD_RES (10)..(10): Cyclobutyl-Ala
  MOD_RES (11)..(11): Alpha-methyl-L-cysteine connected by an i to i+7, seven-methylene crosslinker to another thiol-containing amino acid
  MOD_RES (15)..(15): D-amino acid
  C-term NH2
LTFCEFWAQACAAIA

SEQ ID NO: 2400 - protein, 15 aa, Artificial Sequence
  Description of Artificial Sequence: Synthetic peptide
  N-term Ac
  MOD_RES (4)..(4): Alpha-methyl-D-cysteine connected by an i to i+7, seven-methylene crosslinker to another thiol-containing amino acid
  misc_feature (4)..(11): Crosslink between residues
  MOD_RES (6)..(6): 4-carboxy-Phe
  MOD_RES (7)..(7): 6cl-Trp
  MOD_RES (10)..(10): Cyclobutyl-Ala
  MOD_RES (11)..(11): Alpha-methyl-L-cysteine connected by an i to i+7, seven-methylene crosslinker to another thiol-containing amino acid
  MOD_RES (15)..(15): D-amino acid
  C-term NH2
LTFCEFWAQACAAIA

SEQ ID NO: 2401 - protein, 17 aa, Artificial Sequence
  Description of Artificial Sequence: Synthetic peptide
  N-term Ac
  MOD_RES (4)..(4): Alpha-methyl-D-cysteine connected by an i to i+7, seven-methylene crosslinker to another thiol-containing amino acid
  misc_feature (4)..(11): Crosslink between residues
  MOD_RES (7)..(7): 6cl-Trp
  MOD_RES (11)..(11): Alpha-methyl-L-cysteine connected by an i to i+7, seven-methylene crosslinker to another thiol-containing amino acid
  MOD_RES (17)..(17): D-amino acid
  C-term NH2
LTFCAYWAQLCAAAAAA

SEQ ID NO: 2402 - protein, 17 aa, Artificial Sequence
  Description of Artificial Sequence: Synthetic peptide
  N-term Ac
  MOD_RES (4)..(4): Alpha-methyl-D-cysteine connected by an i to i+7, seven-methylene crosslinker to another thiol-containing amino acid
  misc_feature (4)..(11): Crosslink between residues
  MOD_RES (7)..(7): 6cl-Trp
  MOD_RES (11)..(11): Alpha-methyl-L-cysteine connected by an i to i+7, seven-methylene crosslinker to another thiol-containing amino acid
  MOD_RES (17)..(17): D-amino acid
  C-term NH2
LTFCAYWAQLCAAAAAA

SEQ ID NO: 2403 - protein, 16 aa, Artificial Sequence
  Description of Artificial Sequence: Synthetic peptide
  N-term Ac
  MOD_RES (2)..(2): Alpha-methyl-D-cysteine connected by an i to i+7, seven-methylene crosslinker to another thiol-containing amino acid
  misc_feature (2)..(9): Crosslink between residues
  MOD_RES (5)..(5): 6cl-Trp
  MOD_RES (9)..(9): Alpha-methyl-L-cysteine connected by an i to i+7, seven-methylene crosslinker to another thiol-containing amino acid
  MOD_RES (16)..(16): D-amino acid
  C-term NH2
FCAYWEALCAAAAAAA

SEQ ID NO: 2404 - protein, 17 aa, Artificial Sequence
  Description of Artificial Sequence: Synthetic peptide
  N-term Ac
  MOD_RES (4)..(4): Alpha-methyl-D-cysteine connected by an i to i+7, seven-methylene crosslinker to another thiol-containing amino acid
  misc_feature (4)..(11): Crosslink between residues
  MOD_RES (11)..(11): Alpha-methyl-L-cysteine connected by an i to i+7, seven-methylene crosslinker to another thiol-containing amino acid
  MOD_RES (17)..(17): D-amino acid
  C-term NH2
ETFCEYWAQLCAAAAAA

SEQ ID NO: 2405 - protein, 17 aa, Artificial Sequence
  Description of Artificial Sequence: Synthetic peptide
  N-term Ac
  MOD_RES (4)..(4): Alpha-methyl-D-cysteine connected by an i to i+7, seven-methylene crosslinker to another thiol-containing amino acid
  misc_feature (4)..(11): Crosslink between residues
  MOD_RES (11)..(11): Alpha-methyl-L-cysteine connected by an i to i+7, seven-methylene crosslinker to another thiol-containing amino acid
  MOD_RES (17)..(17): D-amino acid
  C-term NH2
ETFCEYWAQLCAAAAAA

SEQ ID NO: 2406 - protein, 18 aa, Artificial Sequence
  Description of Artificial Sequence: Synthetic peptide
  N-term Ac
  MOD_RES (4)..(4): Alpha-methyl-D-cysteine connected by an i to i+7, seven-methylene crosslinker to another thiol-containing amino acid
  misc_feature (4)..(11): Crosslink between residues
  MOD_RES (11)..(11): Alpha-methyl-L-cysteine connected by an i to i+7, seven-methylene crosslinker to another thiol-containing amino acid
  MOD_RES (18)..(18): D-amino acid
  C-term NH2
LTFCEYWAQLCAAAAAAA

SEQ ID NO: 2407 - protein, 18 aa, Artificial Sequence
  Description of Artificial Sequence: Synthetic peptide
  N-term Ac
  MOD_RES (4)..(4): Alpha-methyl-D-cysteine connected by an i to i+7, seven-methylene crosslinker to another thiol-containing amino acid
  misc_feature (4)..(11): Crosslink between residues
  MOD_RES (11)..(11): Alpha-methyl-L-cysteine connected by an i to i+7, seven-methylene crosslinker to another thiol-containing amino acid
  MOD_RES (18)..(18): D-amino acid
  C-term NH2
LTFCEYWAQLCAAAAAAA

SEQ ID NO: 2408 - protein, 17 aa, Artificial Sequence
  Description of Artificial Sequence: Synthetic peptide
  N-term Ac
  MOD_RES (4)..(4): Alpha-methyl-D-cysteine connected by an i to i+7, seven-methylene crosslinker to another thiol-containing amino acid
  misc_feature (4)..(11): Crosslink between residues
  MOD_RES (11)..(11): Alpha-methyl-L-cysteine connected by an i to i+7, seven-methylene crosslinker to another thiol-containing amino acid
  MOD_RES (14)..(14): Norleucine
  MOD_RES (17)..(17): D-amino acid
  C-term NH2
LTFCAYWAQLCAALAAA

SEQ ID NO: 2409 - protein, 17 aa, Artificial Sequence
  Description of Artificial Sequence: Synthetic peptide
  N-term Ac
  MOD_RES (4)..(4): Alpha-methyl-D-cysteine connected by an i to i+7, seven-methylene crosslinker to another thiol-containing amino acid
  misc_feature (4)..(11): Crosslink between residues
  MOD_RES (11)..(11): Alpha-methyl-L-cysteine connected by an i to i+7, seven-methylene crosslinker to another thiol-containing amino acid
  MOD_RES (14)..(14): Norleucine
  MOD_RES (17)..(17): D-amino acid
  C-term NH2
LTFCAYWAQLCAALAAA

SEQ ID NO: 2410 - protein, 17 aa, Artificial Sequence
  Description of Artificial Sequence: Synthetic peptide
  N-term Ac
  MOD_RES (4)..(4): Alpha-methyl-D-cysteine connected by an i to i+7, seven-methylene crosslinker to another thiol-containing amino acid
  misc_feature (4)..(11): Crosslink between residues
  MOD_RES (10)..(10): Cyclobutyl-Ala
  MOD_RES (11)..(11): Alpha-methyl-L-cysteine connected by an i to i+7, seven-methylene crosslinker to another thiol-containing amino acid
  MOD_RES (17)..(17): D-amino acid
  C-term NH2
LTFCEYWAQACAAAAAA

SEQ ID NO: 2411 - protein, 17 aa, Artificial Sequence
  Description of Artificial Sequence: Synthetic peptide
  N-term Ac
  MOD_RES (4)..(4): Alpha-methyl-D-cysteine connected by an i to i+7, seven-methylene crosslinker to another thiol-containing amino acid
  misc_feature (4)..(11): Crosslink between residues
  MOD_RES (10)..(10): Cyclobutyl-Ala
  MOD_RES (11)..(11): Alpha-methyl-L-cysteine connected by an i to i+7, seven-methylene crosslinker to another thiol-containing amino acid
  MOD_RES (17)..(17): D-amino acid
  C-term NH2
LTFCEYWAQACAAAAAA

SEQ ID NO: 2412 - protein, 17 aa, Artificial Sequence
  Description of Artificial Sequence: Synthetic peptide
  N-term Ac
  MOD_RES (4)..(4): Alpha-methyl-D-cysteine connected by an i to i+7, seven-methylene crosslinker to another thiol-containing amino acid
  misc_feature (4)..(11): Crosslink between residues
  MOD_RES (6)..(6): 4-carboxy-Phe
  MOD_RES (10)..(10): Cyclobutyl-Ala
  MOD_RES (11)..(11): Alpha-methyl-L-cysteine connected by an i to i+7, seven-methylene crosslinker to another thiol-containing amino acid
  MOD_RES (17)..(17): D-amino acid
  C-term NH2
LTFCEFWAQACAAAAAA

SEQ ID NO: 2413 - protein, 17 aa, Artificial Sequence
  Description of Artificial Sequence: Synthetic peptide
  N-term Ac
  MOD_RES (4)..(4): Alpha-methyl-D-cysteine connected by an i to i+7, seven-methylene crosslinker to another thiol-containing amino acid
  misc_feature (4)..(11): Crosslink between residues
  MOD_RES (6)..(6): 4-carboxy-Phe
  MOD_RES (10)..(10): Cyclobutyl-Ala
  MOD_RES (11)..(11): Alpha-methyl-L-cysteine connected by an i to i+7, seven-methylene crosslinker to another thiol-containing amino acid
  MOD_RES (17)..(17): D-amino acid
  C-term NH2
LTFCEFWAQACAAAAAA

SEQ ID NO: 2414 - protein, 17 aa, Artificial Sequence
  Description of Artificial Sequence: Synthetic peptide
  N-term Ac
  MOD_RES (4)..(4): Alpha-methyl-D-cysteine connected by an i to i+7, seven-methylene crosslinker to another thiol-containing amino acid
  misc_feature (4)..(11): Crosslink between residues
  MOD_RES (10)..(10): Cyclobutyl-Ala
  MOD_RES (11)..(11): Alpha-methyl-L-cysteine connected by an i to i+7, seven-methylene crosslinker to another thiol-containing amino acid
  MOD_RES (17)..(17): D-amino acid
  C-term NH2
LTFCEYWSQACAAAAAA

SEQ ID NO: 2415 - protein, 17 aa, Artificial Sequence
  Description of Artificial Sequence: Synthetic peptide
  N-term Ac
  MOD_RES (4)..(4): Alpha-methyl-D-cysteine connected by an i to i+7, seven-methylene crosslinker to another thiol-containing amino acid
  misc_feature (4)..(11): Crosslink between residues
  MOD_RES (10)..(10): Cyclobutyl-Ala
  MOD_RES (11)..(11): Alpha-methyl-L-cysteine connected by an i to i+7, seven-methylene crosslinker to another thiol-containing amino acid
  MOD_RES (17)..(17): D-amino acid
  C-term NH2
LTFCEYWSQACAAAAAA

SEQ ID NO: 2416 - protein, 15 aa, Artificial Sequence
  Description of Artificial Sequence: Synthetic peptide
  N-term Ac
  MOD_RES (4)..(4): Alpha-methyl-D-cysteine connected by an i to i+7, seven-methylene crosslinker to another thiol-containing amino acid
  misc_feature (4)..(11): Crosslink between residues
  MOD_RES (10)..(10): Cyclobutyl-Ala
  MOD_RES (11)..(11): Alpha-methyl-L-cysteine connected by an i to i+7, seven-methylene crosslinker to another thiol-containing amino acid
  MOD_RES (15)..(15): D-amino acid
  C-term NH2
LTFCEYWAQACSAAA

SEQ ID NO: 2417 - protein, 15 aa, Artificial Sequence
  Description of Artificial Sequence: Synthetic peptide
  N-term Ac
  MOD_RES (4)..(4): Alpha-methyl-D-cysteine connected by an i to i+7, seven-methylene crosslinker to another thiol-containing amino acid
  misc_feature (4)..(11): Crosslink between residues
  MOD_RES (10)..(10): Cyclobutyl-Ala
  MOD_RES (11)..(11): Alpha-methyl-L-cysteine connected by an i to i+7, seven-methylene crosslinker to another thiol-containing amino acid
  MOD_RES (15)..(15): D-amino acid
  C-term NH2
LTFCEYWAQACSAAA

SEQ ID NO: 2418 - protein, 16 aa, Artificial Sequence
  Description of Artificial Sequence: Synthetic peptide
  N-term Ac
  MOD_RES (5)..(5): Alpha-methyl-D-cysteine connected by an i to i+7, seven-methylene crosslinker to another thiol-containing amino acid
  misc_feature (5)..(12): Crosslink between residues
  MOD_RES (11)..(11): Cyclobutyl-Ala
  MOD_RES (12)..(12): Alpha-methyl-L-cysteine connected by an i to i+7, seven-methylene crosslinker to another thiol-containing amino acid
  MOD_RES (16)..(16): D-amino acid
  C-term NH2
ALTFCEYWAQACSAAA

SEQ ID NO: 2419 - protein, 16 aa, Artificial Sequence
  Description of Artificial Sequence: Synthetic peptide
  N-term Ac
  MOD_RES (5)..(5): Alpha-methyl-D-cysteine connected by an i to i+7, seven-methylene crosslinker to another thiol-containing amino acid
  misc_feature (5)..(12): Crosslink between residues
  MOD_RES (11)..(11): Cyclobutyl-Ala
  MOD_RES (12)..(12): Alpha-methyl-L-cysteine connected by an i to i+7, seven-methylene crosslinker to another thiol-containing amino acid
  MOD_RES (16)..(16): D-amino acid
  C-term NH2
ALTFCEYWAQACSAAA

SEQ ID NO: 2420 - protein, 17 aa, Artificial Sequence
  Description of Artificial Sequence: Synthetic peptide
  N-term Ac
  MOD_RES (5)..(5): Alpha-methyl-D-cysteine connected by an i to i+7, seven-methylene crosslinker to another thiol-containing amino acid
  misc_feature (5)..(12): Crosslink between residues
  MOD_RES (11)..(11): Cyclobutyl-Ala
  MOD_RES (12)..(12): Alpha-methyl-L-cysteine connected by an i to i+7, seven-methylene crosslinker to another thiol-containing amino acid
  MOD_RES (17)..(17): D-amino acid
  C-term NH2
ALTFCEYWAQACSAAAA

SEQ ID NO: 2421 - protein, 17 aa, Artificial Sequence
  Description of Artificial Sequence: Synthetic peptide
  N-term Ac
  MOD_RES (5)..(5): Alpha-methyl-D-cysteine connected by an i to i+7, seven-methylene crosslinker to another thiol-containing amino acid
  misc_feature (5)..(12): Crosslink between residues
  MOD_RES (11)..(11): Cyclobutyl-Ala
  MOD_RES (12)..(12): Alpha-methyl-L-cysteine connected by an i to i+7, seven-methylene crosslinker to another thiol-containing amino acid
  MOD_RES (17)..(17): D-amino acid
  C-term NH2
ALTFCEYWAQACSAAAA

SEQ ID NO: 2422 - protein, 18 aa, Artificial Sequence
  Description of Artificial Sequence: Synthetic peptide
  N-term Ac
  MOD_RES (6)..(6): Alpha-methyl-D-cysteine connected by an i to i+7, seven-methylene crosslinker to another thiol-containing amino acid
  misc_feature (6)..(13): Crosslink between residues
  MOD_RES (12)..(12): Cyclobutyl-Ala
  MOD_RES (13)..(13): Alpha-methyl-L-cysteine connected by an i to i+7, seven-methylene crosslinker to another thiol-containing amino acid
  MOD_RES (18)..(18): D-amino acid
  C-term NH2
AALTFCEYWAQACSAAAA

SEQ ID NO: 2423 - protein, 18 aa, Artificial Sequence
  Description of Artificial Sequence: Synthetic peptide
  N-term Ac
  MOD_RES (6)..(6): Alpha-methyl-D-cysteine connected by an i to i+7, seven-methylene crosslinker to another thiol-containing amino acid
  misc_feature (6)..(13): Crosslink between residues
  MOD_RES (12)..(12): Cyclobutyl-Ala
  MOD_RES (13)..(13): Alpha-methyl-L-cysteine connected by an i to i+7, seven-methylene crosslinker to another thiol-containing amino acid
  MOD_RES (18)..(18): D-amino acid
  C-term NH2
AALTFCEYWAQACSAAAA

SEQ ID NO: 2424 - protein, 14 aa, Artificial Sequence
  Description of Artificial Sequence: Synthetic peptide
  N-term Ac
  MOD_RES (5)..(5): Alpha-methyl-D-cysteine connected by an i to i+7, seven-methylene crosslinker to another thiol-containing amino acid
  misc_feature (5)..(12): Crosslink between residues
  MOD_RES (11)..(11): Cyclobutyl-Ala
  MOD_RES (12)..(12): Alpha-methyl-L-cysteine connected by an i to i+7, seven-methylene crosslinker to another thiol-containing amino acid
  C-term NH2
RTFCEYWAQACSAA

SEQ ID NO: 2425 - protein, 14 aa, Artificial Sequence
  Description of Artificial Sequence: Synthetic peptide
  N-term Ac
  MOD_RES (4)..(4): Alpha-methyl-D-cysteine connected by an i to i+7, seven-methylene crosslinker to another thiol-containing amino acid
  misc_feature (4)..(11): Crosslink between residues
  MOD_RES (10)..(10): Cyclobutyl-Ala
  MOD_RES (11)..(11): Alpha-methyl-L-cysteine connected by an i to i+7, seven-methylene crosslinker to another thiol-containing amino acid
  C-term NH2
LRFCEYWAQACSAA

SEQ ID NO: 2426 - protein, 14 aa, Artificial Sequence
  Description of Artificial Sequence: Synthetic peptide
  N-term Ac
  MOD_RES (4)..(4): Alpha-methyl-D-cysteine connected by an i to i+7, seven-methylene crosslinker to another thiol-containing amino acid
  misc_feature (4)..(11): Crosslink between residues
  MOD_RES (10)..(10): Cyclobutyl-Ala
  MOD_RES (11)..(11): Alpha-methyl-L-cysteine connected by an i to i+7, seven-methylene crosslinker to another thiol-containing amino acid
  C-term NH2
LTFCEYWRQACSAA

SEQ ID NO: 2427 - protein, 14 aa, Artificial Sequence
  Description of Artificial Sequence: Synthetic peptide
  N-term Ac
  MOD_RES (4)..(4): Alpha-methyl-D-cysteine connected by an i to i+7, seven-methylene crosslinker to another thiol-containing amino acid
  misc_feature (4)..(11): Crosslink between residues
  MOD_RES (10)..(10): Cyclobutyl-Ala
  MOD_RES (11)..(11): Alpha-methyl-L-cysteine connected by an i to i+7, seven-methylene crosslinker to another thiol-containing amino acid
  C-term NH2
LTFCEYWARACSAA

SEQ ID NO: 2428 - protein, 14 aa, Artificial Sequence
  Description of Artificial Sequence: Synthetic peptide
  N-term Ac
  MOD_RES (4)..(4): Alpha-methyl-D-cysteine connected by an i to i+7, seven-methylene crosslinker to another thiol-containing amino acid
  misc_feature (4)..(11): Crosslink between residues
  MOD_RES (10)..(10): Cyclobutyl-Ala
  MOD_RES (11)..(11): Alpha-methyl-L-cysteine connected by an i to i+7, seven-methylene crosslinker to another thiol-containing amino acid
  C-term NH2
LTFCEYWAQACRAA

SEQ ID NO: 2429 - protein, 14 aa, Artificial Sequence
  Description of Artificial Sequence: Synthetic peptide
  N-term Ac
  MOD_RES (4)..(4): Alpha-methyl-D-cysteine connected by an i to i+7, seven-methylene crosslinker to another thiol-containing amino acid
  misc_feature (4)..(11): Crosslink between residues
  MOD_RES (10)..(10): Cyclobutyl-Ala
  MOD_RES (11)..(11): Alpha-methyl-L-cysteine connected by an i to i+7, seven-methylene crosslinker to another thiol-containing amino acid
  C-term NH2
LTFCEYWAQACSRA

SEQ ID NO: 2430 - protein, 14 aa, Artificial Sequence
  Description of Artificial Sequence: Synthetic peptide
  N-term Ac
  MOD_RES (4)..(4): Alpha-methyl-D-cysteine connected by an i to i+7, seven-methylene crosslinker to another thiol-containing amino acid
  misc_feature (4)..(11): Crosslink between residues
  MOD_RES (10)..(10): Cyclobutyl-Ala
  MOD_RES (11)..(11): Alpha-methyl-L-cysteine connected by an i to i+7, seven-methylene crosslinker to another thiol-containing amino acid
  C-term NH2
LTFCEYWAQACSAR

SEQ ID NO: 2431 - protein, 15 aa, Artificial Sequence
  Description of Artificial Sequence: Synthetic peptide
  N-term 5-FAM
  MOD_RES (1)..(1): Beta-Ala
  MOD_RES (5)..(5): Alpha-methyl-D-cysteine connected by an i to i+7, seven-methylene crosslinker to another thiol-containing amino acid
  misc_feature (5)..(12): Crosslink between residues
  MOD_RES (11)..(11): Cyclobutyl-Ala
  MOD_RES (12)..(12): Alpha-methyl-L-cysteine connected by an i to i+7, seven-methylene crosslinker to another thiol-containing amino acid
  C-term NH2
ALTFCEYWAQACSAA

SEQ ID NO: 2432 - protein, 16 aa, Artificial Sequence
  Description of Artificial Sequence: Synthetic peptide
  N-term 5-FAM
  MOD_RES (1)..(1): Beta-Ala
  MOD_RES (5)..(5): Alpha-methyl-D-cysteine connected by an i to i+7, seven-methylene crosslinker to another thiol-containing amino acid
  misc_feature (5)..(12): Crosslink between residues
  MOD_RES (12)..(12): Alpha-methyl-L-cysteine connected by an i to i+7, seven-methylene crosslinker to another thiol-containing amino acid
  MOD_RES (15)..(15): Norleucine
  C-term NH2
ALTFCAYWAQLCAALA

SEQ ID NO: 2433 - protein, 15 aa, Artificial Sequence
  Description of Artificial Sequence: Synthetic peptide
  N-term Ac
  MOD_RES (4)..(4): Alpha-methyl-D-cysteine connected by an i to i+7, seven-methylene crosslinker to another thiol-containing amino acid
  misc_feature (4)..(11): Crosslink between residues
  MOD_RES (11)..(11): Alpha-methyl-L-cysteine connected by an i to i+7, seven-methylene crosslinker to another thiol-containing amino acid
  MOD_RES (14)..(14): Norleucine
  C-term NH2
LAFCEYWAQLCAALA

SEQ ID NO: 2434 - protein, 15 aa, Artificial Sequence
  Description of Artificial Sequence: Synthetic peptide
  N-term Ac
  MOD_RES (4)..(4): Alpha-methyl-D-cysteine connected by an i to i+7, seven-methylene crosslinker to another thiol-containing amino acid
  misc_feature (4)..(11): Crosslink between residues
  MOD_RES (11)..(11): Alpha-methyl-L-cysteine connected by an i to i+7, seven-methylene crosslinker to another thiol-containing amino acid
  MOD_RES (14)..(14): Norleucine
  C-term NH2
ATFCEYWAQLCAALA

SEQ ID NO: 2435 - protein, 15 aa, Artificial Sequence
  Description of Artificial Sequence: Synthetic peptide
  N-term Ac
  MOD_RES (4)..(4): Alpha-methyl-D-cysteine connected by an i to i+7, seven-methylene crosslinker to another thiol-containing amino acid
  misc_feature (4)..(11): Crosslink between residues
  MOD_RES (11)..(11): Alpha-methyl-L-cysteine connected by an i to i+7, seven-methylene crosslinker to another thiol-containing amino acid
  MOD_RES (14)..(14): Norleucine
  C-term NH2
AAFCEYWAQLCAALA

SEQ ID NO: 2436 - protein, 16 aa, Artificial Sequence
  Description of Artificial Sequence: Synthetic peptide
  N-term Ac
  MOD_RES (5)..(5): Alpha-methyl-D-cysteine connected by an i to i+7, seven-methylene crosslinker to another thiol-containing amino acid
  misc_feature (5)..(12): Crosslink between residues
  MOD_RES (12)..(12): Alpha-methyl-L-cysteine connected by an i to i+7, seven-methylene crosslinker to another thiol-containing amino acid
  MOD_RES (15)..(15): Norleucine
  C-term NH2
AAAFCEYWAQLCAALA

SEQ ID NO: 2437 - protein, 17 aa, Artificial Sequence
  Description of Artificial Sequence: Synthetic peptide
  N-term Ac
  MOD_RES (6)..(6): Alpha-methyl-D-cysteine connected by an i to i+7, seven-methylene crosslinker to another thiol-containing amino acid
  misc_feature (6)..(13): Crosslink between residues
  MOD_RES (13)..(13): Alpha-methyl-L-cysteine connected by an i to i+7, seven-methylene crosslinker to another thiol-containing amino acid
  MOD_RES (16)..(16): Norleucine
  C-term NH2
AAAAFCEYWAQLCAALA

SEQ ID NO: 2438 - protein, 16 aa, Artificial Sequence
  Description of Artificial Sequence: Synthetic peptide
  N-term Ac
  MOD_RES (5)..(5): Alpha-methyl-D-cysteine connected by an i to i+7, seven-methylene crosslinker to another thiol-containing amino acid
  misc_feature (5)..(12): Crosslink between residues
  MOD_RES (12)..(12): Alpha-methyl-L-cysteine connected by an i to i+7, seven-methylene crosslinker to another thiol-containing amino acid
  MOD_RES (15)..(15): Norleucine
  C-term NH2
AATFCEYWAQLCAALA

SEQ ID NO: 2439 - protein, 17 aa, Artificial Sequence
  Description of Artificial Sequence: Synthetic peptide
  N-term Ac
  MOD_RES (6)..(6): Alpha-methyl-D-cysteine connected by an i to i+7, seven-methylene crosslinker to another thiol-containing amino acid
  misc_feature (6)..(13): Crosslink between residues
  MOD_RES (13)..(13): Alpha-methyl-L-cysteine connected by an i to i+7, seven-methylene crosslinker to another thiol-containing amino acid
  MOD_RES (16)..(16): Norleucine
  C-term NH2
AALTFCEYWAQLCAALA

SEQ ID NO: 2440 - protein, 18 aa, Artificial Sequence
  Description of Artificial Sequence: Synthetic peptide
  N-term Ac
  MOD_RES (7)..(7): Alpha-methyl-D-cysteine connected by an i to i+7, seven-methylene crosslinker to another thiol-containing amino acid
  misc_feature (7)..(14): Crosslink between residues
  MOD_RES (14)..(14): Alpha-methyl-L-cysteine connected by an i to i+7, seven-methylene crosslinker to another thiol-containing amino acid
  MOD_RES (17)..(17): Norleucine
  C-term NH2
AAALTFCEYWAQLCAALA

SEQ ID NO: 2441 - protein, 16 aa, Artificial Sequence
  Description of Artificial Sequence: Synthetic peptide
  N-term Ac
  MOD_RES (4)..(4): Alpha-methyl-D-cysteine connected by an i to i+7, seven-methylene crosslinker to another thiol-containing amino acid
  misc_feature (4)..(11): Crosslink between residues
  MOD_RES (11)..(11): Alpha-methyl-L-cysteine connected by an i to i+7, seven-methylene crosslinker to another thiol-containing amino acid
  MOD_RES (14)..(14): Norleucine
  C-term NH2
LTFCEYWAQLCAALAA

SEQ ID NO: 2442 - protein, 17 aa, Artificial Sequence
  Description of Artificial Sequence: Synthetic peptide
  N-term Ac
  MOD_RES (5)..(5): Alpha-methyl-D-cysteine connected by an i to i+7, seven-methylene crosslinker to another thiol-containing amino acid
  misc_feature (5)..(12): Crosslink between residues
  MOD_RES (12)..(12): Alpha-methyl-L-cysteine connected by an i to i+7, seven-methylene crosslinker to another thiol-containing amino acid
  MOD_RES (15)..(15): Norleucine
  C-term NH2
ALTFCEYWAQLCAALAA

SEQ ID NO: 2443 - protein, 18 aa, Artificial Sequence
  Description of Artificial Sequence: Synthetic peptide
  N-term Ac
  MOD_RES (6)..(6): Alpha-methyl-D-cysteine connected by an i to i+7, seven-methylene crosslinker to another thiol-containing amino acid
  misc_feature (6)..(13): Crosslink between residues
  MOD_RES (13)..(13): Alpha-methyl-L-cysteine connected by an i to i+7, seven-methylene crosslinker to another thiol-containing amino acid
  MOD_RES (16)..(16): Norleucine
  C-term NH2
AALTFCEYWAQLCAALAA

SEQ ID NO: 2444 - protein, 16 aa, Artificial Sequence
  Description of Artificial Sequence: Synthetic peptide
  N-term Ac
  MOD_RES (4)..(4): Alpha-methyl-D-cysteine connected by an i to i+7, seven-methylene crosslinker to another thiol-containing amino acid
  misc_feature (4)..(11): Crosslink between residues
  MOD_RES (10)..(10): Cyclobutyl-Ala
  MOD_RES (11)..(11): Alpha-methyl-L-cysteine connected by an i to i+7, seven-methylene crosslinker to another thiol-containing amino acid
  MOD_RES (14)..(14): Norleucine
  C-term NH2
LTFCEYWAQACAALAA

SEQ ID NO: 2445 - protein, 16 aa, Artificial Sequence
  Description of Artificial Sequence: Synthetic peptide
  N-term Ac
  MOD_RES (4)..(4): Alpha-methyl-D-cysteine connected by an i to i+7, seven-methylene crosslinker to another thiol-containing amino acid
  misc_feature (4)..(11): Crosslink between residues
  MOD_RES (10)..(10): homo-Leu
  MOD_RES (11)..(11): Alpha-methyl-L-cysteine connected by an i to i+7, seven-methylene crosslinker to another thiol-containing amino acid
  MOD_RES (14)..(14): Norleucine
  C-term NH2
LTFCEYWAQLCAALAA

SEQ ID NO: 2446 - protein, 17 aa, Artificial Sequence
  Description of Artificial Sequence: Synthetic peptide
  N-term Ac
  MOD_RES (5)..(5): Alpha-methyl-D-cysteine connected by an i to i+7, seven-methylene crosslinker to another thiol-containing amino acid
  misc_feature (5)..(12): Crosslink between residues
  MOD_RES (11)..(11): homo-Leu
  MOD_RES (12)..(12): Alpha-methyl-L-cysteine connected by an i to i+7, seven-methylene crosslinker to another thiol-containing amino acid
  MOD_RES (15)..(15): Norleucine
  C-term NH2
ALTFCEYWAQLCAALAA

SEQ ID NO: 2447 - protein, 15 aa, Artificial Sequence
  Description of Artificial Sequence: Synthetic peptide
  N-term Ac
  MOD_RES (4)..(4): Alpha-methyl-D-cysteine connected by an i to i+7, seven-methylene crosslinker to another thiol-containing amino acid
  misc_feature (4)..(11): Crosslink between residues
  MOD_RES (6)..(6): N-methyl-Tyr
  MOD_RES (11)..(11): Alpha-methyl-L-cysteine connected by an i to i+7, seven-methylene crosslinker to another thiol-containing amino acid
  MOD_RES (14)..(14): Norleucine
  C-term NH2
LTFCAYWAQLCAALA

SEQ ID NO: 2448 - protein, 15 aa, Artificial Sequence
  Description of Artificial Sequence: Synthetic peptide
  N-term Ac
  MOD_RES (4)..(4): Alpha-methyl-D-cysteine connected by an i to i+7, seven-methylene crosslinker to another thiol-containing amino acid
  misc_feature (4)..(11): Crosslink between residues
  MOD_RES (6)..(6): N-methyl-Tyr
  MOD_RES (11)..(11): Alpha-methyl-L-cysteine connected by an i to i+7, seven-methylene crosslinker to another thiol-containing amino acid
  MOD_RES (14)..(14): Norleucine
  C-term NH2
LTFCAYWAQLCAALA

SEQ ID NO: 2449 - protein, 15 aa, Artificial Sequence
  Description of Artificial Sequence: Synthetic peptide
  N-term Ac
  MOD_RES (4)..(4): Alpha-methyl-D-cysteine connected by an i to i+7, seven-methylene crosslinker to another thiol-containing amino acid
  misc_feature (4)..(11): Crosslink between residues
  MOD_RES (7)..(7): N-methyl-Trp
  MOD_RES (11)..(11): Alpha-methyl-L-cysteine connected by an i to i+7, seven-methylene crosslinker to another thiol-containing amino acid
  MOD_RES (14)..(14): Norleucine
  C-term NH2
LTFCAYWAQLCAALA

SEQ ID NO: 2450 - protein, 15 aa, Artificial Sequence
  Description of Artificial Sequence: Synthetic peptide
  N-term Ac
  MOD_RES (4)..(4): Alpha-methyl-D-cysteine connected by an i to i+7, seven-methylene crosslinker to another thiol-containing amino acid
  misc_feature (4)..(11): Crosslink between residues
  MOD_RES (7)..(7): N-methyl-Trp
  MOD_RES (11)..(11): Alpha-methyl-L-cysteine connected by an i to i+7, seven-methylene crosslinker to another thiol-containing amino acid
  MOD_RES (14)..(14): Norleucine
  C-term NH2
LTFCAYWAQLCAALA

SEQ ID NO: 2451 - protein, 15 aa, Artificial Sequence
  Description of Artificial Sequence: Synthetic peptide
  N-term Ac
  MOD_RES (4)..(4): Alpha-methyl-D-cysteine connected by an i to i+7, seven-methylene crosslinker to another thiol-containing amino acid
  misc_feature (4)..(11): Crosslink between residues
  MOD_RES (7)..(7): Alpha-Me-Trp
  MOD_RES (11)..(11): Alpha-methyl-L-cysteine connected by an i to i+7, seven-methylene crosslinker to another thiol-containing amino acid
  MOD_RES (14)..(14): Norleucine
  C-term NH2
LTFCAYWAQLCAALA

SEQ ID NO: 2452 - protein, 15 aa, Artificial Sequence
  Description of Artificial Sequence: Synthetic peptide
  N-term Ac
  MOD_RES (4)..(4): Alpha-methyl-D-cysteine connected by an i to i+7, seven-methylene crosslinker to another thiol-containing amino acid
  misc_feature (4)..(11): Crosslink between residues
  MOD_RES (7)..(7): Alpha-Me-Trp
  MOD_RES (11)..(11): Alpha-methyl-L-cysteine connected by an i to i+7, seven-methylene crosslinker to another thiol-containing amino acid
  MOD_RES (14)..(14): Norleucine
  C-term NH2
LTFCAYWAQLCAALA

SEQ ID NO: 2453 - protein, 15 aa, Artificial Sequence
  Description of Artificial Sequence: Synthetic peptide
  N-term Ac
  MOD_RES (4)..(4): Alpha-methyl-D-cysteine connected by an i to i+7, seven-methylene crosslinker to another thiol-containing amino acid
  misc_feature (4)..(11): Crosslink between residues
  MOD_RES (8)..(8): 2-aminoisobutyric acid
  MOD_RES (11)..(11): Alpha-methyl-L-cysteine connected by an i to i+7, seven-methylene crosslinker to another thiol-containing amino acid
  MOD_RES (14)..(14): Norleucine
  C-term NH2
LTFCAYWXQLCAALA

SEQ ID NO: 2454 - protein, 15 aa, Artificial Sequence
  Description of Artificial Sequence: Synthetic peptide
  N-term Ac
  MOD_RES (4)..(4): Alpha-methyl-D-cysteine connected by an i to i+7, seven-methylene crosslinker to another thiol-containing amino acid
  misc_feature (4)..(11): Crosslink between residues
  MOD_RES (8)..(8): 2-aminoisobutyric acid
  MOD_RES (11)..(11): Alpha-methyl-L-cysteine connected by an i to i+7, seven-methylene crosslinker to another thiol-containing amino acid
  MOD_RES (14)..(14): Norleucine
  C-term NH2
LTFCAYWXQLCAALA

SEQ ID NO: 2455 - protein, 15 aa, Artificial Sequence
  Description of Artificial Sequence: Synthetic peptide
  N-term Ac
  MOD_RES (4)..(4): Alpha-methyl-D-cysteine connected by an i to i+7, seven-methylene crosslinker to another thiol-containing amino acid
  misc_feature (4)..(11): Crosslink between residues
  MOD_RES (11)..(11): Alpha-methyl-L-cysteine connected by an i to i+7, seven-methylene crosslinker to another thiol-containing amino acid
  MOD_RES (13)..(13): 2-aminoisobutyric acid
  MOD_RES (14)..(14): Norleucine
  C-term NH2
LTFCAYWAQLCAXLA

SEQ ID NO: 2456 - protein, 15 aa, Artificial Sequence
  Description of Artificial Sequence: Synthetic peptide
  N-term Ac
  MOD_RES (4)..(4): Alpha-methyl-D-cysteine connected by an i to i+7, seven-methylene crosslinker to another thiol-containing amino acid
  misc_feature (4)..(11): Crosslink between residues
  MOD_RES (11)..(11): Alpha-methyl-L-cysteine connected by an i to i+7, seven-methylene crosslinker to another thiol-containing amino acid
  MOD_RES (13)..(13): 2-aminoisobutyric acid
  MOD_RES (14)..(14): Norleucine
  C-term NH2
LTFCAYWAQLCAXLA

SEQ ID NO: 2457 - protein, 15 aa, Artificial Sequence
  Description of Artificial Sequence: Synthetic peptide
  N-term Ac
  MOD_RES (4)..(4): Alpha-methyl-D-cysteine connected by an i to i+7, seven-methylene crosslinker to another thiol-containing amino acid
  misc_feature (4)..(11): Crosslink between residues
  MOD_RES (11)..(11): Alpha-methyl-L-cysteine connected by an i to i+7, seven-methylene crosslinker to another thiol-containing amino acid
  MOD_RES (13)..(13): D-amino acid
  MOD_RES (14)..(14): Norleucine
  C-term NH2
LTFCAYWAQLCAALA

SEQ ID NO: 2458 - protein, 15 aa, Artificial Sequence
  Description of Artificial Sequence: Synthetic peptide
  N-term Ac
  MOD_RES (4)..(4): Alpha-methyl-D-cysteine connected by an i to i+7, seven-methylene crosslinker to another thiol-containing amino acid
  misc_feature (4)..(11): Crosslink between residues
  MOD_RES (11)..(11): Alpha-methyl-L-cysteine connected by an i to i+7, seven-methylene crosslinker to another thiol-containing amino acid
  MOD_RES (13)..(13): D-amino acid
  MOD_RES (14)..(14): Norleucine
  C-term NH2
LTFCAYWAQLCAALA

SEQ ID NO: 2459 - protein, 15 aa, Artificial Sequence
  Description of Artificial Sequence: Synthetic peptide
  N-term Ac
  MOD_RES (4)..(4): Alpha-methyl-D-cysteine connected by an i to i+7, seven-methylene crosslinker to another thiol-containing amino acid
  misc_feature (4)..(11): Crosslink between residues
  MOD_RES (11)..(11): Alpha-methyl-L-cysteine connected by an i to i+7, seven-methylene crosslinker to another thiol-containing amino acid
  MOD_RES (13)..(13): Sarcosine
  MOD_RES (14)..(14): Norleucine
  C-term NH2
LTFCAYWAQLCAXLA

SEQ ID NO: 2460 - protein, 15 aa, Artificial Sequence
  Description of Artificial Sequence: Synthetic peptide
  N-term Ac
  MOD_RES (4)..(4): Alpha-methyl-D-cysteine connected by an i to i+7, seven-methylene crosslinker to another thiol-containing amino acid
  misc_feature (4)..(11): Crosslink between residues
  MOD_RES (11)..(11): Alpha-methyl-L-cysteine connected by an i to i+7, seven-methylene crosslinker to another thiol-containing amino acid
  MOD_RES (13)..(13): Sarcosine
  MOD_RES (14)..(14): Norleucine
  C-term NH2
LTFCAYWAQLCAXLA

SEQ ID NO: 2461 - protein, 15 aa, Artificial Sequence
  Description of Artificial Sequence: Synthetic peptide
  N-term Ac
  MOD_RES (4)..(4): Alpha-methyl-D-cysteine connected by an i to i+7, seven-methylene crosslinker to another thiol-containing amino acid
  misc_feature (4)..(11): Crosslink between residues
  MOD_RES (11)..(11): Alpha-methyl-L-cysteine connected by an i to i+7, seven-methylene crosslinker to another thiol-containing amino acid
  MOD_RES (14)..(14): Norleucine
  MOD_RES (15)..(15): 2-aminoisobutyric acid
  C-term NH2
LTFCAYWAQLCAALX

SEQ ID NO: 2462 - protein, 15 aa, Artificial Sequence
  Description of Artificial Sequence: Synthetic peptide
  N-term Ac
  MOD_RES (4)..(4): Alpha-methyl-D-cysteine connected by an i to i+7, seven-methylene crosslinker to another thiol-containing amino acid
  misc_feature (4)..(11): Crosslink between residues
  MOD_RES (11)..(11): Alpha-methyl-L-cysteine connected by an i to i+7, seven-methylene crosslinker to another thiol-containing amino acid
  MOD_RES (14)..(14): Norleucine
  MOD_RES (15)..(15): 2-aminoisobutyric acid
  C-term NH2
LTFCAYWAQLCAALX

SEQ ID NO: 2463 - protein, 15 aa, Artificial Sequence
  Description of Artificial Sequence: Synthetic peptide
  N-term Ac
  MOD_RES (4)..(4): Alpha-methyl-D-cysteine connected by an i to i+7, seven-methylene crosslinker to another thiol-containing amino acid
  misc_feature (4)..(11): Crosslink between residues
  MOD_RES (11)..(11): Alpha-methyl-L-cysteine connected by an i to i+7, seven-methylene crosslinker to another thiol-containing amino acid
  MOD_RES (14)..(14): Norleucine
  MOD_RES (15)..(15): N-methyl-Ala
  C-term NH2
LTFCAYWAQLCAALA

SEQ ID NO: 2464 - protein, 15 aa, Artificial Sequence
  Description of Artificial Sequence: Synthetic peptide
  N-term Ac
  MOD_RES (4)..(4): Alpha-methyl-D-cysteine connected by an i to i+7, seven-methylene crosslinker to another thiol-containing amino acid
  misc_feature (4)..(11): Crosslink between residues
  MOD_RES (11)..(11): Alpha-methyl-L-cysteine connected by an i to i+7, seven-methylene crosslinker to another thiol-containing amino acid
  MOD_RES (14)..(14): Norleucine
  MOD_RES (15)..(15): N-methyl-Ala
  C-term NH2
LTFCAYWAQLCAALA

SEQ ID NO: 2465 - protein, 15 aa, Artificial Sequence
  Description of Artificial Sequence: Synthetic peptide
  N-term Ac
  MOD_RES (4)..(4): Alpha-methyl-D-cysteine connected by an i to i+7, seven-methylene crosslinker to another thiol-containing amino acid
  misc_feature (4)..(11): Crosslink between residues
  MOD_RES (11)..(11): Alpha-methyl-L-cysteine connected by an i to i+7, seven-methylene crosslinker to another thiol-containing amino acid
  MOD_RES (14)..(14): Norleucine
  MOD_RES (15)..(15): Sarcosine
  C-term NH2
LTFCAYWAQLCAALX

SEQ ID NO: 2466 - protein, 15 aa, Artificial Sequence
  Description of Artificial Sequence: Synthetic peptide
  N-term Ac
  MOD_RES (4)..(4): Alpha-methyl-D-cysteine connected by an i to i+7, seven-methylene crosslinker to another thiol-containing amino acid
  misc_feature (4)..(11): Crosslink between residues
  MOD_RES (11)..(11): Alpha-methyl-L-cysteine connected by an i to i+7, seven-methylene crosslinker to another thiol-containing amino acid
  MOD_RES (14)..(14): Norleucine
  MOD_RES (15)..(15): Sarcosine
  C-term NH2
LTFCAYWAQLCAALX

SEQ ID NO: 2467 - protein, 16 aa, Artificial Sequence
  Description of Artificial Sequence: Synthetic peptide
  N-term Ac
  MOD_RES (4)..(4): Alpha-methyl-D-cysteine connected by an i to i+7, seven-methylene crosslinker to another thiol-containing amino acid
  misc_feature (4)..(11): Crosslink between residues
  MOD_RES (11)..(11): Alpha-methyl-L-cysteine connected by an i to i+7, seven-methylene crosslinker to another thiol-containing amino acid
  MOD_RES (14)..(14): Norleucine
  MOD_RES (16)..(16): 2-aminoisobutyric acid
  C-term NH2
LTFCAYWAQLCAALAX

SEQ ID NO: 2468 - protein, 16 aa, Artificial Sequence
  Description of Artificial Sequence: Synthetic peptide
  N-term Ac
  MOD_RES (4)..(4): Alpha-methyl-D-cysteine connected by an i to i+7, seven-methylene crosslinker to another thiol-containing amino acid
  misc_feature (4)..(11): Crosslink between residues
  MOD_RES (11)..(11): Alpha-methyl-L-cysteine connected by an i to i+7, seven-methylene crosslinker to another thiol-containing amino acid
  MOD_RES (14)..(14): Norleucine
  MOD_RES (16)..(16): 2-aminoisobutyric acid
  C-term NH2
LTFCAYWAQLCAALAX

SEQ ID NO: 2469 - protein, 16 aa, Artificial Sequence
  Description of Artificial Sequence: Synthetic peptide
  N-term Ac
  MOD_RES (4)..(4): Alpha-methyl-D-cysteine connected by an i to i+7, seven-methylene crosslinker to another thiol-containing amino acid
  misc_feature (4)..(11): Crosslink between residues
  MOD_RES (11)..(11): Alpha-methyl-L-cysteine connected by an i to i+7, seven-methylene crosslinker to another thiol-containing amino acid
  MOD_RES (14)..(14): Norleucine
  MOD_RES (16)..(16): N-methyl-Ala
  C-term NH2
LTFCAYWAQLCAALAA

SEQ ID NO: 2470 - protein, 16 aa, Artificial Sequence
  Description of Artificial Sequence: Synthetic peptide
  N-term Ac
  MOD_RES (4)..(4): Alpha-methyl-D-cysteine connected by an i to i+7, seven-methylene crosslinker to another thiol-containing amino acid
  misc_feature (4)..(11): Crosslink between residues
  MOD_RES (11)..(11): Alpha-methyl-L-cysteine connected by an i to i+7, seven-methylene crosslinker to another thiol-containing amino acid
  MOD_RES (14)..(14): Norleucine
  MOD_RES (16)..(16): N-methyl-Ala
  C-term NH2
LTFCAYWAQLCAALAA

SEQ ID NO: 2471 - protein, 16 aa, Artificial Sequence
  Description of Artificial Sequence: Synthetic peptide
  N-term Ac
  MOD_RES (4)..(4): Alpha-methyl-D-cysteine connected by an i to i+7, seven-methylene crosslinker to another thiol-containing amino acid
  misc_feature (4)..(11): Crosslink between residues
  MOD_RES (11)..(11): Alpha-methyl-L-cysteine connected by an i to i+7, seven-methylene crosslinker to another thiol-containing amino acid
  MOD_RES (14)..(14): Norleucine
  MOD_RES (16)..(16): D-amino acid
  C-term NH2
LTFCAYWAQLCAALAA

SEQ ID NO: 2472 - protein, 16 aa, Artificial Sequence
  Description of Artificial Sequence: Synthetic peptide
  N-term Ac
  MOD_RES (4)..(4): Alpha-methyl-D-cysteine connected by an i to i+7, seven-methylene crosslinker to another thiol-containing amino acid
  misc_feature (4)..(11): Crosslink between residues
  MOD_RES (11)..(11): Alpha-methyl-L-cysteine connected by an i to i+7, seven-methylene crosslinker to another thiol-containing amino acid
  MOD_RES (14)..(14): Norleucine
  MOD_RES (16)..(16): D-amino acid
  C-term NH2
LTFCAYWAQLCAALAA

SEQ ID NO: 2473 - protein, 16 aa, Artificial Sequence
  Description of Artificial Sequence: Synthetic peptide
  N-term Ac
  MOD_RES (4)..(4): Alpha-methyl-D-cysteine connected by an i to i+7, seven-methylene crosslinker to another thiol-containing amino acid
  misc_feature (4)..(11): Crosslink between residues
  MOD_RES (11)..(11): Alpha-methyl-L-cysteine connected by an i to i+7, seven-methylene crosslinker to another thiol-containing amino acid
  MOD_RES (14)..(14): Norleucine
  MOD_RES (16)..(16): Sarcosine
  C-term NH2
LTFCAYWAQLCAALAX

SEQ ID NO: 2474 - protein, 16 aa, Artificial Sequence
  Description of Artificial Sequence: Synthetic peptide
  N-term Ac
  MOD_RES (4)..(4): Alpha-methyl-D-cysteine connected by an i to i+7, seven-methylene crosslinker to another thiol-containing amino acid
  misc_feature (4)..(11): Crosslink between residues
  MOD_RES (11)..(11): Alpha-methyl-L-cysteine connected by an i to i+7, seven-methylene crosslinker to another thiol-containing amino acid
  MOD_RES (14)..(14): Norleucine
  MOD_RES (16)..(16): Sarcosine
  C-term NH2
LTFCAYWAQLCAALAX

SEQ ID NO: 2475 - protein, 15 aa, Artificial Sequence
  Description of Artificial Sequence: Synthetic peptide
  N-term Ac
  MOD_RES (4)..(4): Alpha-methyl-R8-L-cysteine not connected by an i to i+7, seven-methylene crosslinker to another thiol-containing amino acid
  MOD_RES (11)..(11): Alpha-methyl-L-cysteine not connected by a i to i+7, seven-methylene crosslinker to another thiol-containing amino acid
  MOD_RES (14)..(14): Norleucine
  C-term NH2
LTFCAYWAQLCAALA

SEQ ID NO: 2476 - protein, 15 aa, Artificial Sequence
  Description of Artificial Sequence: Synthetic peptide
  N-term Ac
  MOD_RES (4)..(4): 2-aminoisobutyric acid
  MOD_RES (11)..(11): 2-aminoisobutyric acid
  MOD_RES (14)..(14): Norleucine
  C-term NH2
LTFXAYWAQLXAALA

SEQ ID NO: 2477 - protein, 15 aa, Artificial Sequence
  Description of Artificial Sequence: Synthetic peptide
  N-term Ac
  MOD_RES (4)..(4): Alpha-methyl-D-cysteine connected by an i to i+7, seven-methylene crosslinker to another thiol-containing amino acid
  misc_feature (4)..(11): Crosslink between residues
  MOD_RES (5)..(5): Cou4
  MOD_RES (11)..(11): Alpha-methyl-L-cysteine connected by an i to i+7, seven-methylene crosslinker to another thiol-containing amino acid
  MOD_RES (14)..(14): Norleucine
  C-term NH2
LTFCXYWAQLCAALA

SEQ ID NO: 2478 - protein, 15 aa, Artificial Sequence
  Description of Artificial Sequence: Synthetic peptide
  N-term Ac
  MOD_RES (4)..(4): Alpha-methyl-D-cysteine connected by an i to i+7, seven-methylene crosslinker to another thiol-containing amino acid
  misc_feature (4)..(11): Crosslink between residues
  MOD_RES (5)..(5): Cou4
  MOD_RES (11)..(11): Alpha-methyl-L-cysteine connected by an i to i+7, seven-methylene crosslinker to another thiol-containing amino acid
  MOD_RES (14)..(14): Norleucine
  C-term NH2
LTFCXYWAQLCAALA

SEQ ID NO: 2479 - protein, 15 aa, Artificial Sequence
  Description of Artificial Sequence: Synthetic peptide
  N-term Ac
  MOD_RES (4)..(4): Alpha-methyl-D-cysteine connected by an i to i+7, seven-methylene crosslinker to another thiol-containing amino acid
  misc_feature (4)..(11): Crosslink between residues
  MOD_RES (8)..(8): Cou4
  MOD_RES (11)..(11): Alpha-methyl-L-cysteine connected by an i to i+7, seven-methylene crosslinker to another thiol-containing amino acid
  MOD_RES (14)..(14): Norleucine
  C-term NH2
LTFCAYWXQLCAALA

SEQ ID NO: 2480 - protein, 15 aa, Artificial Sequence
  Description of Artificial Sequence: Synthetic peptide
  N-term Ac
  MOD_RES (4)..(4): Alpha-methyl-D-cysteine connected by an i to i+7, seven-methylene crosslinker to another thiol-containing amino acid
  misc_feature (4)..(11): Crosslink between residues
  MOD_RES (11)..(11): Alpha-methyl-L-cysteine connected by an i to i+7, seven-methylene crosslinker to another thiol-containing amino acid
  MOD_RES (12)..(12): Cou4
  MOD_RES (14)..(14): Norleucine
  C-term NH2
LTFCAYWAQLCXALA

SEQ ID NO: 2481 - protein, 15 aa, Artificial Sequence
  Description of Artificial Sequence: Synthetic peptide
  N-term Ac
  MOD_RES (4)..(4): Alpha-methyl-D-cysteine connected by an i to i+7, seven-methylene crosslinker to another thiol-containing amino acid
  misc_feature (4)..(11): Crosslink between residues
  MOD_RES (11)..(11): Alpha-methyl-L-cysteine connected by an i to i+7, seven-methylene crosslinker to another thiol-containing amino acid
  MOD_RES (12)..(12): Cou4
  MOD_RES (14)..(14): Norleucine
  C-term NH2
LTFCAYWAQLCXALA

SEQ ID NO: 2482 - protein, 15 aa, Artificial Sequence
  Description of Artificial Sequence: Synthetic peptide
  N-term Ac
  MOD_RES (4)..(4): Alpha-methyl-D-cysteine connected by an i to i+7, seven-methylene crosslinker to another thiol-containing amino acid
  misc_feature (4)..(11): Crosslink between residues
  MOD_RES (11)..(11): Alpha-methyl-L-cysteine connected by an i to i+7, seven-methylene crosslinker to another thiol-containing amino acid
  MOD_RES (13)..(13): Cou4
  MOD_RES (14)..(14): Norleucine
  C-term NH2
LTFCAYWAQLCAXLA

SEQ ID NO: 2483 - protein, 15 aa, Artificial Sequence
  Description of Artificial Sequence: Synthetic peptide
  N-term Ac
  MOD_RES (4)..(4): Alpha-methyl-D-cysteine connected by an i to i+7, seven-methylene crosslinker to another thiol-containing amino acid
  misc_feature (4)..(11): Crosslink between residues
  MOD_RES (11)..(11): Alpha-methyl-L-cysteine connected by an i to i+7, seven-methylene crosslinker to another thiol-containing amino acid
  MOD_RES (13)..(13): Cou4
  MOD_RES (14)..(14): Norleucine
  C-term NH2
LTFCAYWAQLCAXLA

SEQ ID NO: 2484 - protein, 15 aa, Artificial Sequence
  Description of Artificial Sequence: Synthetic peptide
  N-term Ac
  MOD_RES (4)..(4): Alpha-methyl-D-cysteine connected by an i to i+7, seven-methylene crosslinker to another thiol-containing amino acid
  misc_feature (4)..(11): Crosslink between residues
  MOD_RES (11)..(11): Alpha-methyl-L-cysteine connected by an i to i+7, seven-methylene crosslinker to another thiol-containing amino acid
  MOD_RES (14)..(14): Norleucine
  C-term OH
LTFCAYWAQLCAALA

SEQ ID NO: 2485 - protein, 15 aa, Artificial Sequence
  Description of Artificial Sequence: Synthetic peptide
  N-term Ac
  MOD_RES (4)..(4): Alpha-methyl-D-cysteine connected by an i to i+7, seven-methylene crosslinker to another thiol-containing amino acid
  misc_feature (4)..(11): Crosslink between residues
  MOD_RES (11)..(11): Alpha-methyl-L-cysteine connected by an i to i+7, seven-methylene crosslinker to another thiol-containing amino acid
  MOD_RES (14)..(14): Norleucine
  C-term OH
LTFCAYWAQLCAALA

SEQ ID NO: 2486 - protein, 15 aa, Artificial Sequence
  Description of Artificial Sequence: Synthetic peptide
  N-term Ac
  MOD_RES (4)..(4): Alpha-methyl-D-cysteine connected by an i to i+7, seven-methylene crosslinker to another thiol-containing amino acid
  misc_feature (4)..(11): Crosslink between residues
  MOD_RES (11)..(11): Alpha-methyl-L-cysteine connected by an i to i+7, seven-methylene crosslinker to another thiol-containing amino acid
  MOD_RES (14)..(14): Norleucine
  C-term NHnPr
LTFCAYWAQLCAALA

SEQ ID NO: 2487 - protein, 15 aa, Artificial Sequence
  Description of Artificial Sequence: Synthetic peptide
  N-term Ac
  MOD_RES (4)..(4): Alpha-methyl-D-cysteine connected by an i to i+7, seven-methylene crosslinker to another thiol-containing amino acid
  misc_feature (4)..(11): Crosslink between residues
  MOD_RES (11)..(11): Alpha-methyl-L-cysteine connected by an i to i+7, seven-methylene crosslinker to another thiol-containing amino acid
  MOD_RES (14)..(14): Norleucine
  C-term NHnPr
LTFCAYWAQLCAALA

SEQ ID NO: 2488 - protein, 15 aa, Artificial Sequence
  Description of Artificial Sequence: Synthetic peptide
  N-term Ac
  MOD_RES (4)..(4): Alpha-methyl-D-cysteine connected by an i to i+7, seven-methylene crosslinker to another thiol-containing amino acid
  misc_feature (4)..(11): Crosslink between residues
  MOD_RES (11)..(11): Alpha-methyl-L-cysteine connected by an i to i+7, seven-methylene crosslinker to another thiol-containing amino acid
  MOD_RES (14)..(14): Norleucine
  C-term NHnBu33Me
LTFCAYWAQLCAALA

SEQ ID NO: 2489 - protein, 15 aa, Artificial Sequence
  Description of Artificial Sequence: Synthetic peptide
  N-term Ac
  MOD_RES (4)..(4): Alpha-methyl-D-cysteine connected by an i to i+7, seven-methylene crosslinker to another thiol-containing amino acid
  misc_feature (4)..(11): Crosslink between residues
  MOD_RES (11)..(11): Alpha-methyl-L-cysteine connected by an i to i+7, seven-methylene crosslinker to another thiol-containing amino acid
  MOD_RES (14)..(14): Norleucine
  C-term NHnBu33Me
LTFCAYWAQLCAALA

SEQ ID NO: 2490 - protein, 15 aa, Artificial Sequence
  Description of Artificial Sequence: Synthetic peptide
  N-term Ac
  MOD_RES (4)..(4): Alpha-methyl-D-cysteine connected by an i to i+7, seven-methylene crosslinker to another thiol-containing amino acid
  misc_feature (4)..(11): Crosslink between residues
  MOD_RES (11)..(11): Alpha-methyl-L-cysteine connected by an i to i+7, seven-methylene crosslinker to another thiol-containing amino acid
  MOD_RES (14)..(14): Norleucine
  C-term NHHex
LTFCAYWAQLCAALA

SEQ ID NO: 2491 - protein, 15 aa, Artificial Sequence
  Description of Artificial Sequence: Synthetic peptide
  N-term Ac
  MOD_RES (4)..(4): Alpha-methyl-D-cysteine connected by an i to i+7, seven-methylene crosslinker to another thiol-containing amino acid
  misc_feature (4)..(11): Crosslink between residues
  MOD_RES (11)..(11): Alpha-methyl-L-cysteine connected by an i to i+7, seven-methylene crosslinker to another thiol-containing amino acid
  MOD_RES (14)..(14): Norleucine
  C-term NHHex
LTFCAYWAQLCAALA

SEQ ID NO: 2492 - protein, 15 aa, Artificial Sequence
  Description of Artificial Sequence: Synthetic peptide
  N-term Ac
  MOD_RES (4)..(4): Alpha-methyl-D-cysteine connected by an i to i+7, seven-methylene crosslinker to another thiol-containing amino acid
  misc_feature (4)..(11): Crosslink between residues
  MOD_RES (11)..(11): Alpha-methyl-L-cysteine connected by an i to i+7, seven-methylene crosslinker to another thiol-containing amino acid
  MOD_RES (14)..(14): Norleucine
  C-term NH2
LTACAYWAQLCAALA

SEQ ID NO: 2493 - protein, 15 aa, Artificial Sequence
  Description of Artificial Sequence: Synthetic peptide
  N-term Ac
  MOD_RES (3)..(3): homo-Leu
  MOD_RES (4)..(4): Alpha-methyl-D-cysteine connected by an i to i+7, seven-methylene crosslinker to another thiol-containing amino acid
  misc_feature (4)..(11): Crosslink between residues
  MOD_RES (11)..(11): Alpha-methyl-L-cysteine connected by an i to i+7, seven-methylene crosslinker to another thiol-containing amino acid
  MOD_RES (14)..(14): Norleucine
  C-term NH2
LTLCAYWAQLCAALA

SEQ ID NO: 2494 - protein, 15 aa, Artificial Sequence
  Description of Artificial Sequence: Synthetic peptide
  N-term Ac
  MOD_RES (4)..(4): Alpha-methyl-D-cysteine connected by an i to i+7, seven-methylene crosslinker to another thiol-containing amino acid
  misc_feature (4)..(11): Crosslink between residues
  MOD_RES (11)..(11): Alpha-methyl-L-cysteine connected by an i to i+7, seven-methylene crosslinker to another thiol-containing amino acid
  MOD_RES (14)..(14): Norleucine
  C-term NH2
LTFCAYAAQLCAALA

SEQ ID NO: 2495 - protein, 15 aa, Artificial Sequence
  Description of Artificial Sequence: Synthetic peptide
  N-term Ac
  MOD_RES (4)..(4): Alpha-methyl-D-cysteine connected by an i to i+7, seven-methylene crosslinker to another thiol-containing amino acid
  misc_feature (4)..(11): Crosslink between residues
  MOD_RES (7)..(7): 2Nal
  MOD_RES (11)..(11): Alpha-methyl-L-cysteine connected by an i to i+7, seven-methylene crosslinker to another thiol-containing amino acid
  MOD_RES (14)..(14): Norleucine
  C-term NH2
LTFCAYAAQLCAALA

SEQ ID NO: 2496 - protein, 14 aa, Artificial Sequence
  Description of Artificial Sequence: Synthetic peptide
  N-term Ac
  MOD_RES (4)..(4): Alpha-methyl-D-cysteine connected by an i to i+7, seven-methylene crosslinker to another thiol-containing amino acid
  misc_feature (4)..(11): Crosslink between residues
  MOD_RES (8)..(8): Cou4
  MOD_RES (10)..(10): Cyclobutyl-Ala
  MOD_RES (11)..(11): Alpha-methyl-L-cysteine connected by an i to i+7, seven-methylene crosslinker to another thiol-containing amino acid
  C-term NH2
LTFCEYWXQACSAA

SEQ ID NO: 2497 - protein, 14 aa, Artificial Sequence
  Description of Artificial Sequence: Synthetic peptide
  N-term Ac
  MOD_RES (4)..(4): Alpha-methyl-D-cysteine connected by an i to i+7, seven-methylene crosslinker to another thiol-containing amino acid
  misc_feature (4)..(11): Crosslink between residues
  MOD_RES (8)..(8): Cou7
  MOD_RES (10)..(10): Cyclobutyl-Ala
  MOD_RES (11)..(11): Alpha-methyl-L-cysteine connected by an i to i+7, seven-methylene crosslinker to another thiol-containing amino acid
  C-term NH2
LTFCEYWXQACSAA

SEQ ID NO: 2498 - protein, 14 aa, Artificial Sequence
  Description of Artificial Sequence: Synthetic peptide
  N-term Dmaac
  MOD_RES (4)..(4): Alpha-methyl-D-cysteine connected by an i to i+7, seven-methylene crosslinker to another thiol-containing amino acid
  misc_feature (4)..(11): Crosslink between residues
  MOD_RES (10)..(10): Cyclobutyl-Ala
  MOD_RES (11)..(11): Alpha-methyl-L-cysteine connected by an i to i+7, seven-methylene crosslinker to another thiol-containing amino acid
  C-term NH2
LTFCEYWAQACSAA

SEQ ID NO: 2499 - protein, 17 aa, Artificial Sequence
  Description of Artificial Sequence: Synthetic peptide
  N-term Dmaac
  MOD_RES (4)..(4): Alpha-methyl-D-cysteine connected by an i to i+7, seven-methylene crosslinker to another thiol-containing amino acid
  misc_feature (4)..(11): Crosslink between residues
  MOD_RES (11)..(11): Alpha-methyl-L-cysteine connected by an i to i+7, seven-methylene crosslinker to another thiol-containing amino acid
  MOD_RES (17)..(17): D-amino acid
  C-term NH2
LTFCAYWAQLCAAAAAA

SEQ ID NO: 2500 - protein, 17 aa, Artificial Sequence
  Description of Artificial Sequence: Synthetic peptide
  N-term Dmaac
  MOD_RES (4)..(4): Alpha-methyl-D-cysteine connected by an i to i+7, seven-methylene crosslinker to another thiol-containing amino acid
  misc_feature (4)..(11): Crosslink between residues
  MOD_RES (11)..(11): Alpha-methyl-L-cysteine connected by an i to i+7, seven-methylene crosslinker to another thiol-containing amino acid
  MOD_RES (17)..(17): D-amino acid
  C-term NH2
LTFCAYWAQLCAAAAAA

SEQ ID NO: 2501 - protein, 17 aa, Artificial Sequence
  Description of Artificial Sequence: Synthetic peptide
  N-term Dmaac
  MOD_RES (4)..(4): Alpha-methyl-D-cysteine connected by an i to i+7, seven-methylene crosslinker to another thiol-containing amino acid
  misc_feature (4)..(11): Crosslink between residues
  MOD_RES (11)..(11): Alpha-methyl-L-cysteine connected by an i to i+7, seven-methylene crosslinker to another thiol-containing amino acid
  MOD_RES (17)..(17): D-amino acid
  C-term NH2
LTFCEYWAQLCAAAAAA

SEQ ID NO: 2502 - protein, 17 aa, Artificial Sequence
  Description of Artificial Sequence: Synthetic peptide
  N-term Dmaac
  MOD_RES (4)..(4): Alpha-methyl-D-cysteine connected by an i to i+7, seven-methylene crosslinker to another thiol-containing amino acid
  misc_feature (4)..(11): Crosslink between residues
  MOD_RES (11)..(11): Alpha-methyl-L-cysteine connected by an i to i+7, seven-methylene crosslinker to another thiol-containing amino acid
  MOD_RES (17)..(17): D-amino acid
  C-term NH2
LTFCEYWAQLCAAAAAA

SEQ ID NO: 2503 - protein, 15 aa, Artificial Sequence
  Description of Artificial Sequence: Synthetic peptide
  N-term Dmaac
  MOD_RES (4)..(4): Alpha-methyl-D-cysteine connected by an i to i+7, seven-methylene crosslinker to another thiol-containing amino acid
  misc_feature (4)..(11): Crosslink between residues
  MOD_RES (6)..(6): 4-carboxy-Phe
  MOD_RES (10)..(10): Cyclobutyl-Ala
  MOD_RES (11)..(11): Alpha-methyl-L-cysteine connected by an i to i+7, seven-methylene crosslinker to another thiol-containing amino acid
  MOD_RES (15)..(15): D-amino acid
  C-term NH2
LTFCEFWAQACAAIA

SEQ ID NO: 2504 - protein, 15 aa, Artificial Sequence
  Description of Artificial Sequence: Synthetic peptide
  N-term Dmaac
  MOD_RES (4)..(4): Alpha-methyl-D-cysteine connected by an i to i+7, seven-methylene crosslinker to another thiol-containing amino acid
  misc_feature (4)..(11): Crosslink between residues
  MOD_RES (6)..(6): 4-carboxy-Phe
  MOD_RES (10)..(10): Cyclobutyl-Ala
  MOD_RES (11)..(11): Alpha-methyl-L-cysteine connected by an i to i+7, seven-methylene crosslinker to another thiol-containing amino acid
  MOD_RES (15)..(15): D-amino acid
  C-term NH2
LTFCEFWAQACAAIA

SEQ ID NO: 2505 - protein, 15 aa, Artificial Sequence
  Description of Artificial Sequence: Synthetic peptide
  N-term Dmaac
  MOD_RES (4)..(4): Alpha-methyl-D-cysteine connected by an i to i+7, seven-methylene crosslinker to another thiol-containing amino acid
  misc_feature (4)..(11): Crosslink between residues
  MOD_RES (11)..(11): Alpha-methyl-L-cysteine connected by an i to i+7, seven-methylene crosslinker to another thiol-containing amino acid
  MOD_RES (14)..(14): Norleucine
  C-term NH2
LTFCAYWAQLCAALA

SEQ ID NO: 2506 - protein, 15 aa, Artificial Sequence
  Description of Artificial Sequence: Synthetic peptide
  N-term Dmaac
  MOD_RES (4)..(4): Alpha-methyl-D-cysteine connected by an i to i+7, seven-methylene crosslinker to another thiol-containing amino acid
  misc_feature (4)..(11): Crosslink between residues
  MOD_RES (11)..(11): Alpha-methyl-L-cysteine connected by an i to i+7, seven-methylene crosslinker to another thiol-containing amino acid
  MOD_RES (14)..(14): Norleucine
  C-term NH2
LTFCAYWAQLCAALA

SEQ ID NO: 2507 - protein, 16 aa, Artificial Sequence
  Description of Artificial Sequence: Synthetic peptide
  MOD_RES (1)..(1): Cou6
  MOD_RES (2)..(2): Beta-Ala
  MOD_RES (6)..(6): Alpha-methyl-D-cysteine connected by an i to i+7, seven-methylene crosslinker to another thiol-containing amino acid
  misc_feature (6)..(13): Crosslink between residues
  MOD_RES (12)..(12): homo-Leu
  MOD_RES (13)..(13): Alpha-methyl-L-cysteine connected by an i to i+7, seven-methylene crosslinker to another thiol-containing amino acid
  C-term NH2
XALTFCEYWAQLCSAA

SEQ ID NO: 2508 - protein, 16 aa, Artificial Sequence
  Description of Artificial Sequence: Synthetic peptide
  MOD_RES (1)..(1): Cou8
  MOD_RES (2)..(2): Beta-Ala
  MOD_RES (6)..(6): Alpha-methyl-D-cysteine connected by an i to i+7, seven-methylene crosslinker to another thiol-containing amino acid
  misc_feature (6)..(13): Crosslink between residues
  MOD_RES (12)..(12): homo-Leu
  MOD_RES (13)..(13): Alpha-methyl-L-cysteine connected by an i to i+7, seven-methylene crosslinker to another thiol-containing amino acid
  C-term NH2
XALTFCEYWAQLCSAA

SEQ ID NO: 2509 - protein, 17 aa, Artificial Sequence
  Description of Artificial Sequence: Synthetic peptide
  N-term Ac
  MOD_RES (3)..(3): 4-iodo-Phe
  MOD_RES (4)..(4): Alpha-methyl-D-cysteine connected by an i to i+7, seven-methylene crosslinker to another thiol-containing amino acid
  misc_feature (4)..(11): Crosslink between residues
  MOD_RES (11)..(11): Alpha-methyl-L-cysteine connected by an i to i+7, seven-methylene crosslinker to another thiol-containing amino acid
  MOD_RES (17)..(17): D-amino acid
  C-term NH2
LTFCEYWAQLCAAAAAA

SEQ ID NO: 2510 - protein, 15 aa, Artificial Sequence
  Description of Artificial Sequence: Synthetic peptide
  N-term Ac
  MOD_RES (4)..(4): Alpha-methyl-D-cysteine connected by an i to i+7, seven-methylene crosslinker to another thiol-containing amino acid
  misc_feature (4)..(11): Crosslink between residues
  MOD_RES (11)..(11): Alpha-methyl-L-cysteine connected by an i to i+7, seven-methylene crosslinker to another thiol-containing amino acid
  MOD_RES (14)..(14): Norleucine
  C-term NH2
LTFCAYWAQLCAALA

SEQ ID NO: 2511 - protein, 17 aa, Artificial Sequence
  Description of Artificial Sequence: Synthetic peptide
  N-term Ac
  MOD_RES (4)..(4): Alpha-methyl-D-cysteine connected by an i to i+7, seven-methylene crosslinker to another thiol-containing amino acid
  misc_feature (4)..(11): Crosslink between residues
  MOD_RES (11)..(11): Alpha-methyl-L-cysteine connected by an i to i+7, seven-methylene crosslinker to another thiol-containing amino acid
  MOD_RES (17)..(17): D-amino acid
  C-term NH2
LTFCAYWAQLCAAAAAA

SEQ ID NO: 2512 - protein, 15 aa, Artificial Sequence
  Description of Artificial Sequence: Synthetic peptide
  N-term Ac
  MOD_RES (4)..(4): Alpha-methyl-D-cysteine connected by an i to i+7, Bph (4,4'-bismethyl-biphenyl) crosslinker to another thiol-containing amino acid
  misc_feature (4)..(11): Crosslink between residues
  MOD_RES (11)..(11): Alpha-methyl-L-cysteine connected by an i to i+7, Bph (4,4'-bismethyl-biphenyl) crosslinker to another thiol-containing amino acid
  MOD_RES (14)..(14): Norleucine
  C-term NH2
LTFCAYWAQLCAALA

SEQ ID NO: 2513 - protein, 17 aa, Artificial Sequence
  Description of Artificial Sequence: Synthetic peptide
  N-term Ac
  MOD_RES (4)..(4): Alpha-methyl-D-cysteine connected by an i to i+7, Bph (4,4'-bismethyl-biphenyl) crosslinker to another thiol-containing amino acid
  misc_feature (4)..(11): Crosslink between residues
  MOD_RES (11)..(11): Alpha-methyl-L-cysteine connected by an i to i+7, Bph (4,4'-bismethyl-biphenyl) crosslinker to another thiol-containing amino acid
  MOD_RES (17)..(17): D-amino acid
  C-term NH2
LTFCAYWAQLCAAAAAA

SEQ ID NO: 2514 - protein, 14 aa, Artificial Sequence
  Description of Artificial Sequence: Synthetic peptide
  N-term Ac
  MOD_RES (4)..(4): Alpha-methyl-D-cysteine connected by an i to i+7, Bph (4,4'-bismethyl-biphenyl) crosslinker to another thiol-containing amino acid
  misc_feature (4)..(11): Crosslink between residues
  MOD_RES (10)..(10): Cyclobutyl-Ala
  MOD_RES (11)..(11): Alpha-methyl-L-cysteine connected by an i to i+7, Bph (4,4'-bismethyl-biphenyl) crosslinker to another thiol-containing amino acid
  C-term NH2
LTFCEYWAQACSAA

SEQ ID NO: 2515 - protein, 14 aa, Artificial Sequence
  Description of Artificial Sequence: Synthetic peptide
  N-term Ac
  MOD_RES (4)..(4): D-cysteine connected by an i to i+7, seven- methylene crosslinker to another thiol-containing amino acid
  misc_feature (4)..(11): Crosslink between residues
  MOD_RES (10)..(10): Cyclobutyl-Ala
  MOD_RES (11)..(11): L-cysteine connected by an i to i+7, seven- methylene crosslinker to another thiol-containing amino acid
  C-term NH2
LTFCEYWAQACSAA

SEQ ID NO: 2516 - protein, 14 aa, Artificial Sequence
  Description of Artificial Sequence: Synthetic peptide
  N-term Ac
  MOD_RES (4)..(4): D-cysteine connected by an i to i+7, Bph (4,4'-bismethyl-biphenyl) crosslinker to another thiol-containing amino acid
  misc_feature (4)..(11): Crosslink between residues
  MOD_RES (10)..(10): Cyclobutyl-Ala
  MOD_RES (11)..(11): L-cysteine connected by an i to i+7, Bph (4,4'-bismethyl-biphenyl) crosslinker to another thiol-containing amino acid
  C-term NH2
LTFCEYWAQACSAA

SEQ ID NO: 2517 - protein, 17 aa, Artificial Sequence
  Description of Artificial Sequence: Synthetic peptide
  N-term Ac
  MOD_RES (4)..(4): Alpha-methyl-D-cysteine connected by an i to i+7, Bph (4,4'-bismethyl-biphenyl) crosslinker to another thiol-containing amino acid
  misc_feature (4)..(11): Crosslink between residues
  MOD_RES (11)..(11): Alpha-methyl-L-cysteine connected by an i to i+7, Bph (4,4'-bismethyl-biphenyl) crosslinker to another thiol-containing amino acid
  MOD_RES (17)..(17): D-amino acid
  C-term NH2
LTFCEYWAQLCAAAAAA

SEQ ID NO: 2518 - protein, 15 aa, Artificial Sequence
  Description of Artificial Sequence: Synthetic peptide
  N-term Ac
  MOD_RES (4)..(4): Alpha-methyl-D-cysteine connected by an i to i+7, five-methylene crosslinker to another thiol-containing amino acid
  misc_feature (4)..(11): Crosslink between residues
  MOD_RES (11)..(11): Alpha-methyl-L-cysteine connected by an i to i+7, five-methylene crosslinker to another thiol-containing amino acid
  MOD_RES (14)..(14): Norleucine
  C-term NH2
LTFCAYWAQLCAALA

SEQ ID NO: 2519 - protein, 17 aa, Artificial Sequence
  Description of Artificial Sequence: Synthetic peptide
  N-term Ac
  MOD_RES (4)..(4): Alpha-methyl-D-cysteine connected by an i to i+7, five-methylene crosslinker to another thiol-containing amino acid
  misc_feature (4)..(11): Crosslink between residues
  MOD_RES (11)..(11): Alpha-methyl-L-cysteine connected by an i to i+7, five-methylene crosslinker to another thiol-containing amino acid
  MOD_RES (17)..(17): D-amino acid
  C-term NH2
LTFCAYWAQLCAAAAAA

SEQ ID NO: 2520 - protein, 15 aa, Artificial Sequence
  Description of Artificial Sequence: Synthetic peptide
  N-term Ac
  MOD_RES (4)..(4): Alpha-methyl-D-cysteine connected by an i to i+7, six-methylene crosslinker to another thiol-containing amino acid
  misc_feature (4)..(11): Crosslink between residues
  MOD_RES (11)..(11): Alpha-methyl-L-cysteine connected by an i to i+7, six-methylene crosslinker to another thiol-containing amino acid
  MOD_RES (14)..(14): Norleucine
  C-term NH2
LTFCAYWAQLCAALA

SEQ ID NO: 2521 - protein, 17 aa, Artificial Sequence
  Description of Artificial Sequence: Synthetic peptide
  N-term Ac
  MOD_RES (4)..(4): Alpha-methyl-D-cysteine connected by an i to i+7, six-methylene crosslinker to another thiol-containing amino acid
  misc_feature (4)..(11): Crosslink between residues
  MOD_RES (11)..(11): Alpha-methyl-L-cysteine connected by an i to i+7, six-methylene crosslinker to another thiol-containing amino acid
  MOD_RES (17)..(17): D-amino acid
  C-term NH2
LTFCAYWAQLCAAAAAA

SEQ ID NO: 2522 - protein, 17 aa, Artificial Sequence
  Description of Artificial Sequence: Synthetic peptide
  N-term Ac
  MOD_RES (4)..(4): Alpha-methyl-D-cysteine connected by an i to i+7, six-methylene crosslinker to another thiol-containing amino acid
  misc_feature (4)..(11): Crosslink between residues
  MOD_RES (11)..(11): Alpha-methyl-L-cysteine connected by an i to i+7, six-methylene crosslinker to another thiol-containing amino acid
  MOD_RES (17)..(17): D-amino acid
  C-term NH2
LTFCEYWAQLCAAAAAA

SEQ ID NO: 2523 - protein, 17 aa, Artificial Sequence
  Description of Artificial Sequence: Synthetic peptide
  N-term Ac
  MOD_RES (4)..(4): Alpha-methyl-D-cysteine connected by an i to i+7, five-methylene crosslinker to another thiol-containing amino acid
  misc_feature (4)..(11): Crosslink between residues
  MOD_RES (11)..(11): Alpha-methyl-L-cysteine connected by an i to i+7, five-methylene crosslinker to another thiol-containing amino acid
  MOD_RES (17)..(17): D-amino acid
  C-term NH2
LTFCEYWAQLCAAAAAA

SEQ ID NO: 2524 - protein, 14 aa, Artificial Sequence
  Description of Artificial Sequence: Synthetic peptide
  N-term Ac
  MOD_RES (4)..(4): Alpha-methyl-D-cysteine connected by an i to i+7, six-methylene crosslinker to another thiol-containing amino acid
  misc_feature (4)..(11): Crosslink between residues
  MOD_RES (10)..(10): Cyclobutyl-Ala
  MOD_RES (11)..(11): Alpha-methyl-L-cysteine connected by an i to i+7, six-methylene crosslinker to another thiol-containing amino acid
  C-term NH2
LTFCEYWAQACSAA

SEQ ID NO: 2525 - protein, 14 aa, Artificial Sequence
  Description of Artificial Sequence: Synthetic peptide
  N-term Ac
  MOD_RES (4)..(4): Alpha-methyl-D-cysteine connected by an i to i+7, five-methylene crosslinker to another thiol-containing amino acid
  misc_feature (4)..(11): Crosslink between residues
  MOD_RES (10)..(10): Cyclobutyl-Ala
  MOD_RES (11)..(11): Alpha-methyl-L-cysteine connected by an i to i+7, five-methylene crosslinker to another thiol-containing amino acid
  C-term NH2
LTFCEYWAQACSAA

SEQ ID NO: 2526-2527 - skipped (2 entries)

SEQ ID NO: 2528 - protein, 17 aa, Artificial Sequence
  Description of Artificial Sequence: Synthetic peptide
  N-term Ac
  MOD_RES (4)..(4): Alpha-methyl-D-cysteine connected by an i to i+7, seven-methylene crosslinker to another thiol-containing amino acid
  misc_feature (4)..(11): Crosslink between residues
  MOD_RES (11)..(11): Alpha-methyl-L-cysteine connected by an i to i+7, seven-methylene crosslinker to another thiol-containing amino acid
  MOD_RES (17)..(17): D-amino acid
  C-term NH2
LTFCAYWAQLCAAAAAA

SEQ ID NO: 2529 - protein, 15 aa, Artificial Sequence
  Description of Artificial Sequence: Synthetic peptide
  N-term Ac
  MOD_RES (4)..(4): Alpha-methyl-D-cysteine connected by an i to i+7, Bph (4,4'-bismethyl-biphenyl) crosslinker to another thiol-containing amino acid
  misc_feature (4)..(11): Crosslink between residues
  MOD_RES (11)..(11): Alpha-methyl-L-cysteine connected by an i to i+7, Bph (4,4'-bismethyl-biphenyl) crosslinker to another thiol-containing amino acid
  MOD_RES (14)..(14): Norleucine
  C-term NH2
LTFCAYWAQLCAALA

SEQ ID NO: 2530 - protein, 15 aa, Artificial Sequence
  Description of Artificial Sequence: Synthetic peptide
  MOD_RES (7)..(7): Alpha-methyl-D-cysteine connected by an i to i+7, methylene crosslinker to another thiol-containing amino acid
  misc_feature (7)..(13): Crosslink between residues
  MOD_RES (13)..(13): Alpha-methyl-D-cysteine connected by an i to i+7, six-methylene crosslinker to another thiol-containing amino acid
QSQQTFCNLWLLCQN

SEQ ID NO: 2531 - protein, 15 aa, Artificial Sequence
  Description of Artificial Sequence: Synthetic peptide
  MOD_RES (7)..(7): Alpha-methyl-D-cysteine connected by an i to i+7, methylene crosslinker to another thiol-containing amino acid
  misc_feature (7)..(13): Crosslink between residues
  MOD_RES (13)..(13): Alpha-methyl-D-cysteine connected by an i to i+7, seven-methylene crosslinker to another thiol-containing amino acid
QSQQTFCNLWLLCQN

SEQ ID NO: 2532 - protein, 15 aa, Artificial Sequence
  Description of Artificial Sequence: Synthetic peptide
  MOD_RES (7)..(7): Alpha-methyl-D-cysteine connected by an i to i+7, methylene crosslinker to another thiol-containing amino acid
  misc_feature (7)..(13): Crosslink between residues
  MOD_RES (13)..(13): Alpha-methyl-D-cysteine connected by an i to i+7, eight-methylene crosslinker to another thiol-containing amino acid
QSQQTFCNLWLLCQN

SEQ ID NO: 2533 - protein, 15 aa, Artificial Sequence
  Description of Artificial Sequence: Synthetic peptide
  MOD_RES (7)..(7): Alpha-methyl-D-cysteine connected by an i to i+7, methylene crosslinker to another thiol-containing amino acid
  misc_feature (7)..(13): Crosslink between residues
  MOD_RES (13)..(13): Alpha-methyl-D-cysteine connected by an i to i+7, nine-methylene crosslinker to another thiol-containing amino acid
QSQQTFCNLWLLCQN

SEQ ID NO: 2534 - protein, 16 aa, Artificial Sequence
  Description of Artificial Sequence: Synthetic peptide
  N-term Ac
  MOD_RES (7)..(7): D-cysteine connected by an i to i+7, five-methylene crosslinker to another thiol-containing amino acid
  misc_feature (7)..(14): Crosslink between residues
  MOD_RES (14)..(14): L-cysteine connected by an i to i+7, five-methylene crosslinker to another thiol-containing amino acid
  C-term NH2
QSQQTFCNLWRLLCQN

SEQ ID NO: 2535 - protein, 16 aa, Artificial Sequence
  Description of Artificial Sequence: Synthetic peptide
  N-term Ac
  MOD_RES (7)..(7): D-cysteine connected by an i to i+7, six-methylene crosslinker to another thiol-containing amino acid
  misc_feature (7)..(14): Crosslink between residues
  MOD_RES (14)..(14): L-cysteine connected by an i to i+7, six- methylene crosslinker to another thiol-containing amino acid
  C-term NH2
QSQQTFCNLWRLLCQN

SEQ ID NO: 2536 - protein, 16 aa, Artificial Sequence
  Description of Artificial Sequence: Synthetic peptide
  N-term Ac
  MOD_RES (7)..(7): D-cysteine connected by an i to i+7, seven- methylene crosslinker to another thiol-containing amino acid
  misc_feature (7)..(14): Crosslink between residues
  MOD_RES (14)..(14): L-cysteine connected by an i to i+7, seven- methylene crosslinker to another thiol-containing amino acid
  C-term NH2
QSQQTFCNLWRLLCQN

SEQ ID NO: 2537 - protein, 16 aa, Artificial Sequence
  Description of Artificial Sequence: Synthetic peptide
  N-term Ac
  MOD_RES (7)..(7): D-cysteine connected by an i to i+7, eight-methylene crosslinker to another thiol-containing amino acid
  misc_feature (7)..(14): Crosslink between residues
  MOD_RES (14)..(14): L-cysteine connected by an i to i+7, eight-methylene crosslinker to another thiol-containing amino acid
  C-term NH2
QSQQTFCNLWRLLCQN

SEQ ID NO: 2538 - protein, 16 aa, Artificial Sequence
  Description of Artificial Sequence: Synthetic peptide
  N-term Ac
  MOD_RES (7)..(7): D-cysteine connected by an i to i+7, nine-methylene crosslinker to another thiol-containing amino acid
  misc_feature (7)..(14): Crosslink between residues
  MOD_RES (14)..(14): L-cysteine connected by an i to i+7, nine-methylene crosslinker to another thiol-containing amino acid
  C-term NH2
QSQQTFCNLWRLLCQN

SEQ ID NO: 2539 - protein, 16 aa, Artificial Sequence
  Description of Artificial Sequence: Synthetic peptide
  N-term Ac
  MOD_RES (7)..(7): Alpha-methyl-D-cysteine connected by an i to i+7, eight-methylene crosslinker to another thiol-containing amino acid
  misc_feature (7)..(14): Crosslink between residues
  MOD_RES (14)..(14): Alpha-methyl-L-cysteine connected by an i to i+7, eight-methylene crosslinker to another thiol-containing amino acid
  C-term NH2
QSQQTFCNLWRLLCQN

SEQ ID NO: 2540 - protein, 16 aa, Artificial Sequence
  Description of Artificial Sequence: Synthetic peptide
  N-term Ac
  MOD_RES (7)..(7): D-cysteine connected by an i to i+7, eight-methylene crosslinker to another thiol-containing amino acid
  misc_feature (7)..(14): Crosslink between residues
  MOD_RES (14)..(14): L-penicillamine connected by an i to i+7, eight-methylene crosslinker to another thiol-containing amino acid
  C-term NH2
QSQQTFCNLWRLLXQN

SEQ ID NO: 2541 - protein, 16 aa, Artificial Sequence
  Description of Artificial Sequence: Synthetic peptide
  N-term Ac
  MOD_RES (7)..(7): L-cysteine connected by an i to i+7, eight-methylene crosslinker to another thiol-containing amino acid
  misc_feature (7)..(14): Crosslink between residues
  MOD_RES (14)..(14): L-cysteine connected by an i to i+7, eight-methylene crosslinker to another thiol-containing amino acid
  C-term NH2
QSQQTFCNLWRLLCQN

SEQ ID NO: 2542 - protein, 16 aa, Artificial Sequence
  Description of Artificial Sequence: Synthetic peptide
  N-term Ac
  MOD_RES (7)..(7): L-cysteine connected by an i to i+7, eight-methylene crosslinker to another thiol-containing amino acid
  misc_feature (7)..(14): Crosslink between residues
  MOD_RES (14)..(14): D-cysteine connected by an i to i+7, eight-methylene crosslinker to another thiol-containing amino acid
  C-term NH2
QSQQTFCNLWRLLCQN

SEQ ID NO: 2543 - protein, 16 aa, Artificial Sequence
  Description of Artificial Sequence: Synthetic peptide
  N-term Ac
  MOD_RES (7)..(7): D-cysteine connected by an i to i+7, eight-methylene crosslinker to another thiol-containing amino acid
  misc_feature (7)..(14): Crosslink between residues
  MOD_RES (14)..(14): L-cysteine connected by an i to i+7, eight-methylene crosslinker to another thiol-containing amino acid
  C-term NH2
QSQQTFCNLWALLCAN

SEQ ID NO: 2544 - protein, 16 aa, Artificial Sequence
  Description of Artificial Sequence: Synthetic peptide
  N-term Ac
  MOD_RES (2)..(2): 2-aminoisobutyric acid
  MOD_RES (7)..(7): D-cysteine connected by an i to i+7, eight-methylene crosslinker to another thiol-containing amino acid
  misc_feature (7)..(14): Crosslink between residues
  MOD_RES (14)..(14): L-cysteine connected by an i to i+7, eight-methylene crosslinker to another thiol-containing amino acid
  C-term NH2
QXQQTFCNLWALLCAN

SEQ ID NO: 2545 - protein, 16 aa, Artificial Sequence
  Description of Artificial Sequence: Synthetic peptide
  N-term Ac
  MOD_RES (2)..(2): 2-aminoisobutyric acid
  MOD_RES (7)..(7): D-cysteine connected by an i to i+7, eight-methylene crosslinker to another thiol-containing amino acid
  misc_feature (7)..(14): Crosslink between residues
  MOD_RES (14)..(14): L-cysteine connected by an i to i+7, eight-methylene crosslinker to another thiol-containing amino acid
  C-term NH2
QXQQTFCALWALLCAN

SEQ ID NO: 2546 - protein, 16 aa, Artificial Sequence
  Description of Artificial Sequence: Synthetic peptide
  N-term Ac
  MOD_RES (7)..(7): D-penicillamine connected by an i to i+7, eight-methylene crosslinker to another thiol-containing amino acid
  misc_feature (7)..(14): Crosslink between residues
  MOD_RES (14)..(14): L-penicillamine connected by an i to i+7, eight-methylene crosslinker to another thiol-containing amino acid
  C-term NH2
QSQQTFXNLWRLLXQN

SEQ ID NO: 2547 - protein, 16 aa, Artificial Sequence
  Description of Artificial Sequence: Synthetic peptide
  N-term Ac
  MOD_RES (7)..(7): D-penicillamine connected by an i to i+7, eight-methylene crosslinker to another thiol-containing amino acid
  misc_feature (7)..(14): Crosslink between residues
  MOD_RES (14)..(14): L-cysteine connected by an i to i+7, eight-methylene crosslinker to another thiol-containing amino acid
  C-term NH2
QSQQTFXNLWRLLCQN

SEQ ID NO: 2548 - protein, 16 aa, Artificial Sequence
  Description of Artificial Sequence: Synthetic peptide
  N-term Ac
  MOD_RES (7)..(7): Alpha-methyl-D-cysteine connected by an i to i+7, nine-methylene crosslinker to another thiol-containing amino acid
  misc_feature (7)..(14): Crosslink between residues
  MOD_RES (14)..(14): Alpha-methyl-L-cysteine connected by an i to i+7, nine-methylene crosslinker to another thiol-containing amino acid
  C-term NH2
QSQQTFCNLWRLLCQN

SEQ ID NO: 2549 - protein, 12 aa, Artificial Sequence
  Description of Artificial Sequence: Synthetic peptide
  N-term Ac
  MOD_RES (4)..(4): D-cysteine connected by an i to i+7, eight-methylene crosslinker to another thiol-containing amino acid
  misc_feature (4)..(11): Crosslink between residues
  MOD_RES (11)..(11): L-cysteine connected by an i to i+7, eight-methylene crosslinker to another thiol-containing amino acid
  C-term NH2
LTFCHYWAQLCS

SEQ ID NO: 2550 - protein, 12 aa, Artificial Sequence
  Description of Artificial Sequence: Synthetic peptide
  N-term Ac
  MOD_RES (4)..(4): D-cysteine connected by an i to i+7, eight-methylene crosslinker to another thiol-containing amino acid
  misc_feature (4)..(11): Crosslink between residues
  MOD_RES (11)..(11): L-cysteine connected by an i to i+7, eight-methylene crosslinker to another thiol-containing amino acid
  C-term NH2
LTFCHYWAQICS

SEQ ID NO: 2551 - protein, 12 aa, Artificial Sequence
  Description of Artificial Sequence: Synthetic peptide
  N-term Ac
  MOD_RES (4)..(4): D-cysteine connected by an i to i+7, eight-methylene crosslinker to another thiol-containing amino acid
  misc_feature (4)..(11): Crosslink between residues
  MOD_RES (10)..(10): Norleucine
  MOD_RES (11)..(11): L-cysteine connected by an i to i+7, eight-methylene crosslinker to another thiol-containing amino acid
  C-term NH2
LTFCHYWAQLCS

SEQ ID NO: 2552 - protein, 12 aa, Artificial Sequence
  Description of Artificial Sequence: Synthetic peptide
  N-term Ac
  MOD_RES (4)..(4): D-cysteine connected by an i to i+7, eight-methylene crosslinker to another thiol-containing amino acid
  misc_feature (4)..(11): Crosslink between residues
  MOD_RES (11)..(11): L-cysteine connected by an i to i+7, eight-methylene crosslinker to another thiol-containing amino acid
  C-term NH2
LTFCHYWAQLCA

SEQ ID NO: 2553 - protein, 12 aa, Artificial Sequence
  Description of Artificial Sequence: Synthetic peptide
  N-term Ac
  MOD_RES (4)..(4): D-cysteine connected by an i to i+7, eight-methylene crosslinker to another thiol-containing amino acid
  misc_feature (4)..(11): Crosslink between residues
  MOD_RES (8)..(8): Abu
  MOD_RES (11)..(11): L-cysteine connected by an i to i+7, eight-methylene crosslinker to another thiol-containing amino acid
  C-term NH2
LTFCHYWXQLCS

SEQ ID NO: 2554 - protein, 12 aa, Artificial Sequence
  Description of Artificial Sequence: Synthetic peptide
  N-term Ac
  MOD_RES (4)..(4): D-cysteine connected by an i to i+7, eight-methylene crosslinker to another thiol-containing amino acid
  misc_feature (4)..(11): Crosslink between residues
  MOD_RES (11)..(11): L-cysteine connected by an i to i+7, eight-methylene crosslinker to another thiol-containing amino acid
  C-term NH2
LTFCAYWAQLCS

SEQ ID NO: 2555 - protein, 12 aa, Artificial Sequence
  Description of Artificial Sequence: Synthetic peptide
  N-term Ac
  MOD_RES (4)..(4): D-cysteine connected by an i to i+7, eight-methylene crosslinker to another thiol-containing amino acid
  misc_feature (4)..(11): Crosslink between residues
  MOD_RES (11)..(11): L-cysteine connected by an i to i+7, eight-methylene crosslinker to another thiol-containing amino acid
  C-term NH2
LTFCAYWAQLCA

SEQ ID NO: 2556 - protein, 12 aa, Artificial Sequence
  Description of Artificial Sequence: Synthetic peptide
  N-term Ac
  MOD_RES (4)..(4): D-cysteine connected by an i to i+7, eight-methylene crosslinker to another thiol-containing amino acid
  misc_feature (4)..(11): Crosslink between residues
  MOD_RES (11)..(11): L-penicillamine connected by an i to i+7, eight-methylene crosslinker to another thiol-containing amino acid
  C-term NH2
LTFCHYWAQLXS

SEQ ID NO: 2557 - protein, 12 aa, Artificial Sequence
  Description of Artificial Sequence: Synthetic peptide
  N-term Ac
  MOD_RES (4)..(4): D-penicillamine connected by an i to i+7, eight-methylene crosslinker to another thiol-containing amino acid
  misc_feature (4)..(11): Crosslink between residues
  MOD_RES (11)..(11): L-penicillamine connected by an i to i+7, eight-methylene crosslinker to another thiol-containing amino acid
  C-term NH2
LTFXHYWAQLXS

SEQ ID NO: 2558 - protein, 12 aa, Artificial Sequence
  Description of Artificial Sequence: Synthetic peptide
  N-term Ac
  MOD_RES (4)..(4): D-penicillamine connected by an i to i+7, eight-methylene crosslinker to another thiol-containing amino acid
  misc_feature (4)..(11): Crosslink between residues
  MOD_RES (11)..(11): L-cysteine connected by an i to i+7, eight-methylene crosslinker to another thiol-containing amino acid
  C-term NH2
LTFXHYWAQLCS

SEQ ID NO: 2559 - protein, 12 aa, Artificial Sequence
  Description of Artificial Sequence: Synthetic peptide
  N-term Ac
  MOD_RES (4)..(4): D-cysteine connected by an i to i+7, seven- methylene crosslinker to another thiol-containing amino acid
  misc_feature (4)..(11): Crosslink between residues
  MOD_RES (11)..(11): h-L-cysteine connected by an i to i+7, seven-methylene crosslinker to another thiol-containing amino acid
  C-term NH2
LTFCHYWAQLCS

SEQ ID NO: 2560 - protein, 12 aa, Artificial Sequence
  Description of Artificial Sequence: Synthetic peptide
  N-term Ac
  MOD_RES (4)..(4): Alpha-methyl-D-cysteine connected by an i to i+7, eight-methylene crosslinker to another thiol-containing amino acid
  misc_feature (4)..(11): Crosslink between residues
  MOD_RES (11)..(11): Alpha-methyl-L-cysteine connected by an i to i+7, eight-methylene crosslinker to another thiol-containing amino acid
  C-term NH2
LTFCHYWAQLCS

SEQ ID NO: 2561 - protein, 12 aa, Artificial Sequence
  Description of Artificial Sequence: Synthetic peptide
  N-term Ac
  MOD_RES (4)..(4): Alpha-methyl-D-cysteine connected by an i to i+7, nine-methylene crosslinker to another thiol-containing amino acid
  misc_feature (4)..(11): Crosslink between residues
  MOD_RES (11)..(11): Alpha-methyl-L-cysteine connected by an i to i+7, nine-methylene crosslinker to another thiol-containing amino acid
  C-term NH2
LTFCHYWAQLCS

SEQ ID NO: 2562 - protein, 12 aa, Artificial Sequence
  Description of Artificial Sequence: Synthetic peptide
  N-term Ac
  MOD_RES (4)..(4): Alpha-methyl-D-cysteine connected by an i to i+7, ten-methylene crosslinker to another thiol-containing amino acid
  misc_feature (4)..(11): Crosslink between residues
  MOD_RES (11)..(11): Alpha-methyl-L-cysteine connected by an i to i+7, ten-methylene crosslinker to another thiol-containing amino acid
  C-term NH2
LTFCHYWAQLCS

SEQ ID NO: 2563 - protein, 12 aa, Artificial Sequence
  Description of Artificial Sequence: Synthetic peptide
  N-term Ac
  MOD_RES (4)..(4): Alpha-methyl-D-cysteine connected by an i to i+7, seven-methylene crosslinker to another thiol-containing amino acid
  misc_feature (4)..(11): Crosslink between residues
  MOD_RES (11)..(11): Alpha-methyl-L-cysteine connected by an i to i+7, seven-methylene crosslinker to another thiol-containing amino acid
  C-term NH2
LTFCHYWAQLCS

SEQ ID NO: 2564 - protein, 12 aa, Artificial Sequence
  Description of Artificial Sequence: Synthetic peptide
  N-term Ac
  MOD_RES (4)..(4): Alpha-methyl-D-cysteine connected by an i to i+7, four-methylene crosslinker to another thiol-containing amino acid-BEB
  misc_feature (4)..(11): Crosslink between residues
  MOD_RES (11)..(11): Alpha-methyl-L-cysteine connected by an i to i+7, four-methylene crosslinker to another thiol-containing amino acid-BEB
  C-term NH2
LTFCHYWAQLCS

SEQ ID NO: 2565 - protein, 10 aa, Artificial Sequence
  Description of Artificial Sequence: Synthetic peptide
  N-term Ac
  MOD_RES (2)..(2): D-penicillamine connected by an i to i+7, eight-methylene crosslinker to another thiol-containing amino acid
  misc_feature (2)..(9): Crosslink between residues
  MOD_RES (7)..(7): Ac3c
  MOD_RES (9)..(9): L-cysteine connected by an i to i+7, eight-methylene crosslinker to another thiol-containing amino acid
  C-term NH2
FXAYWEXLCA

SEQ ID NO: 2566 - protein, 10 aa, Artificial Sequence
  Description of Artificial Sequence: Synthetic peptide
  N-term Ac
  MOD_RES (2)..(2): D-cysteine connected by an i to i+7, eight-methylene crosslinker to another thiol-containing amino acid
  misc_feature (2)..(9): Crosslink between residues
  MOD_RES (7)..(7): Ac3c
  MOD_RES (9)..(9): L-cysteine connected by an i to i+7, eight-methylene crosslinker to another thiol-containing amino acid
  C-term NH2
FCAYWEXLCA

SEQ ID NO: 2567 - protein, 10 aa, Artificial Sequence
  Description of Artificial Sequence: Synthetic peptide
  N-term Ac
  MOD_RES (2)..(2): Alpha-methyl-D-cysteine connected by an i to i+7, eight-methylene crosslinker to another thiol-containing amino acid
  misc_feature (2)..(9): Crosslink between residues
  MOD_RES (7)..(7): Ac3c
  MOD_RES (9)..(9): Alpha-methyl-L-cysteine connected by an i to i+7, eight-methylene crosslinker to another thiol-containing amino acid
  C-term NH2
FCAYWEXLCA

SEQ ID NO: 2568 - protein, 12 aa, Artificial Sequence
  Description of Artificial Sequence: Synthetic peptide
  N-term Ac
  C-term NH2
LTFEHYWAQLTS

SEQ ID NO: 2569 - protein, 12 aa, Artificial Sequence
  Description of Artificial Sequence: Synthetic peptide
LTFEHYWAQLTS

SEQ ID NO: 2570 - protein, 12 aa, Artificial Sequence
  Description of Artificial Sequence: Synthetic peptide
LTFCHYWAQLCS

SEQ ID NO: 2571 - protein, 12 aa, Artificial Sequence
  Description of Artificial Sequence: Synthetic peptide
  MOD_RES (4)..(4): L-cysteine connected by an i to i+7, Bph (4,4'-bismethyl-biphenyl) crosslinker to another thiol-containing amino acid
  misc_feature (4)..(11): Crosslink between residues
  MOD_RES (11)..(11): L-cysteine connected by an i to i+7, Bph (4,4'-bismethyl-biphenyl) crosslinker to another thiol-containing amino acid
LTFCHYWAQLCS

SEQ ID NO: 2572 - protein, 12 aa, Artificial Sequence
  Description of Artificial Sequence: Synthetic peptide
  MOD_RES (4)..(4): L-cysteine connected by an i to i+7, Bpy (6,6'-bismethyl-[3,3']bipyridine) crosslinker to another thiol-containing amino acid
  misc_feature (4)..(11): Crosslink between residues
  MOD_RES (11)..(11): L-cysteine connected by an i to i+7, Bpy (6,6'-bismethyl-[3,3']bipyridine) crosslinker to another thiol-containing amino acid
LTFCHYWAQLCS

SEQ ID NO: 2573 - protein, 12 aa, Artificial Sequence
  Description of Artificial Sequence: Synthetic peptide
LTFCRYWARLCS

SEQ ID NO: 2574 - protein, 12 aa, Artificial Sequence
  Description of Artificial Sequence: Synthetic peptide
  MOD_RES (4)..(4): L-cysteine connected by an i to i+7, Bph (4,4'-bismethyl-biphenyl) crosslinker to another thiol-containing amino acid
  misc_feature (4)..(11): Crosslink between residues
  MOD_RES (11)..(11): L-cysteine connected by an i to i+7, Bph (4,4'-bismethyl-biphenyl) crosslinker to another thiol-containing amino acid
LTFCRYWARLCS

SEQ ID NO: 2575 - protein, 12 aa, Artificial Sequence
  Description of Artificial Sequence: Synthetic peptide
  MOD_RES (4)..(4): L-cysteine connected by an i to i+7, Bpy (6,6'-bismethyl-[3,3']bipyridine) crosslinker to another thiol-containing amino acid
  misc_feature (4)..(11): Crosslink between residues
  MOD_RES (11)..(11): L-cysteine connected by an i to i+7, Bpy (6,6'-bismethyl-[3,3']bipyridine) crosslinker to another thiol-containing amino acid
LTFCRYWARLCS

SEQ ID NO: 2576 - protein, 12 aa, Artificial Sequence
  Description of Artificial Sequence: Synthetic peptide
  MOD_RES (4)..(4): D-amino acid
LTFCHYWAQLCS

SEQ ID NO: 2577 - protein, 12 aa, Artificial Sequence
  Description of Artificial Sequence: Synthetic peptide
  MOD_RES (4)..(4): D-cysteine connected by an i to i+7, Bph (4,4'-bismethyl-biphenyl) crosslinker to another thiol-containing amino acid
  misc_feature (4)..(11): Crosslink between residues
  MOD_RES (11)..(11): L-cysteine connected by an i to i+7, Bph (4,4'-bismethyl-biphenyl) crosslinker to another thiol-containing amino acid
LTFCHYWAQLCS

SEQ ID NO: 2578 - protein, 12 aa, Artificial Sequence
  Description of Artificial Sequence: Synthetic peptide
  MOD_RES (4)..(4): D-cysteine connected by an i to i+7, Bpy (6,6'-bismethyl-[3,3']bipyridine) crosslinker to another thiol-containing amino acid
  misc_feature (4)..(11): Crosslink between residues
  MOD_RES (11)..(11): D-cysteine connected by an i to i+7, Bpy (6,6'-bismethyl-[3,3']bipyridine) crosslinker to another thiol-containing amino acid
LTFCHYWAQLCS

SEQ ID NO: 2579 - protein, 12 aa, Artificial Sequence
  Description of Artificial Sequence: Synthetic peptide
  MOD_RES (4)..(4): D-cysteine connected by an i to i+7, Bph (4,4'-bismethyl-biphenyl) crosslinker to another thiol-containing amino acid
  misc_feature (4)..(11): Crosslink between residues
  MOD_RES (11)..(11): L-cysteine connected by an i to i+7, Bph (4,4'-bismethyl-biphenyl) crosslinker to another thiol-containing amino acid
LTFCRYWARLCS

SEQ ID NO: 2580 - protein, 12 aa, Artificial Sequence
  Description of Artificial Sequence: Synthetic peptide
  MOD_RES (4)..(4): D-cysteine connected by an i to i+7, Bpy (6,6'-bismethyl-[3,3']bipyridine) crosslinker to another thiol-containing amino acid
  misc_feature (4)..(11): Crosslink between residues
  MOD_RES (11)..(11): L-cysteine connected by an i to i+7, Bpy (6,6'-bismethyl-[3,3']bipyridine) crosslinker to another thiol-containing amino acid
LTFCRYWARLCS

SEQ ID NO: 2581 - protein, 13 aa, Artificial Sequence
  Description of Artificial Sequence: Synthetic peptide
  N-term 5-FAM
  MOD_RES (1)..(1): Beta-Ala
  C-term NH2
ALTFEHYWAQLTS

SEQ ID NO: 2582 - protein, 393 aa, Homo sapiens [sequence omitted]

What is claimed is:

1. A method for treating a condition in a subject in need thereof, the method comprising:
a) performing an assay to determine a mutational status of a gene that modulates the p53 pathway in the subject; and
b) administering to the subject a therapeutically-effective amount of a peptidomimetic macrocycle or a pharmaceutically-acceptable salt thereof.

2. The method of claim 1, wherein the peptidomimetic macrocycle comprises a sequence that is at least 60% identical to a subsequence of p53.

3. The method of claim 1, wherein the peptidomimetic macrocycle binds to MDM2, HDM2, MDMX, or HDMX.

4. The method of claim 1, wherein the gene is TP53.

5. The method of claim 1, wherein the mutational status relates to a mutation that is a frameshift.

6. The method of claim 1, wherein the mutational status relates to a mutation that is a splice site mutation.

7. The method of claim 1, wherein the mutational status relates to a mutation that is an insertion.

8. The method of claim 1, wherein the mutational status relates to a mutation that is a deletion.

9. The method of claim 1, wherein the mutational status relates to a mutation that is a substitution.

10. The method of claim 1, wherein the mutational status relates to a mutation that is a copy number loss.

11. The method of claim 1, wherein the mutational status relates to a mutation that is a single nucleotide polymorphism.

12. The method of claim 1, wherein the assay is next-generation sequencing.

13. The method of claim 1, wherein the assay is DNA sequencing.

14. The method of claim 1, wherein the assay is RNA sequencing.

15. The method of claim 1, wherein the condition is a cancer.

16. The method of claim 1, wherein the peptidomimetic macrocycle comprises an amino acid sequence that is at least about 60% identical to an amino acid sequence of the amino acid sequences in Tables 9-24.

17. The method of claim 1, wherein the peptidomimetic macrocycle comprises an amino acid sequence that is at least about 80% identical to an amino acid sequence of the amino acid sequences in Tables 9-24.

18. The method of claim 1, wherein the peptidomimetic macrocycle comprises an amino acid sequence that is at least about 90% identical to an amino acid sequence of the amino acid sequences in Tables 9-24.

19. The method of claim 1, wherein the peptidomimetic macrocycle comprises an amino acid sequence that is at least about 95% identical to an amino acid sequence of the amino acid sequences in Tables 9-24.

20. The method of claim 1, wherein the peptidomimetic macrocycle comprises an amino acid sequence that is an amino acid sequence of the amino acid sequences in Tables 9-24.

21. The method of claim 1, wherein the peptidomimetic macrocycle is an amino acid sequence of the amino acid sequences in Tables 9-24.
